United States Patent Application Publication US 2025/0319185 A1 - sequence listing, part 2

SEQ ID NO: 2828 - protein, 715 aa, synthetic construct
  REGION 1..715: note = Synthetic
MALPVTALLLPLALLLHAARPVTQEPSFSVSPGGTVTLTCGLSSGSVSTSYYPSWYQQTPGQAPRTLIYSTNIRSSGVPDRFSGSILGNKAALTITGAQADDESDYYCVLYMGSDIVVFGGGTKLTVLGSTSGSGKPGSGEGSTKGQVQLVESGGGVVQPGRSLRLSCAASGFTFSSYGMHWVRQAPGKGLEWVAVISYDGSNKYYADSVKGRFTISRDNSKTTLYLQMNSLRAEDTAVYYCARDHYYYYMDVWGKGTTVTVSSAAATTTPAPRPPTPAPTIASQPLSLRPEACRPAAGGAVHTRGLDFACDIYIWAPLAGTCGVLLLSLVITLYCKRGRKKLLYIFKQPFMRPVQTTQEEDGCSCRFPEEEEGGCELRVKFSRSADAPAYQQGQNQLYNELNLGRREEYDVLDKRRGRDPEMGGKPRRKNPQEGLYNELQKDKMAEAYSEIGMKGERRRGKGHDGLYQGLSTATKDTYDALHMQALPPRGSGEGRGSLLTCGDVEENPGPMALPVTALLLPLALLLHAARPNWVNVISDLKKIEDLIQSMHIDATLYTESDVHPSCKVTAMKCFLLELQVISLESGDASIHDTVENLIILANNSLSSNGNVTESGCKECEELEEKNIKEFLQSFVHIVQMFINTSTTTPAPRPPTPAPTIASQPLSLRPEACRPAAGGAVHTRGLDFACDIYIWAPLAGTCGVLLLSLVITLYC

SEQ ID NO: 2829 - protein, 720 aa, synthetic construct
  REGION 1..720: note = Synthetic
MALPVTALLLPLALLLHAARPEIVLTQSPATLSLSPGERATLSCRASQSVSSYFAWYQQKPGQAPRLLIYDASNRATGIPARFSGSGSGTDFTLTISSLEPEDFAVYYCQQRSNWPLTFGGGTKVEIKGSTSGSGKPGSGEGSTKGQLQLQESGPGLVKPSETLSLTCTVSGGSISSSSYYWGWIRQPPGKGLEWIGSLYYSGSTYYNPSLKSRVTISVDTSKNQFSLKLSSVTAADTAVYYCAAVQLERRGYFYMDVWGKGTTVTVSSAAATTTPAPRPPTPAPTIASQPLSLRPEACRPAAGGAVHTRGLDFACDIYIWAPLAGTCGVLLLSLVITLYCKRGRKKLLYIFKQPFMRPVQTTQEEDGCSCRFPEEEEGGCELRVKFSRSADAPAYQQGQNQLYNELNLGRREEYDVLDKRRGRDPEMGGKPRRKNPQEGLYNELQKDKMAEAYSEIGMKGERRRGKGHDGLYQGLSTATKDTYDALHMQALPPRGSGEGRGSLLTCGDVEENPGPMALPVTALLLPLALLLHAARPNWVNVISDLKKIEDLIQSMHIDATLYTESDVHPSCKVTAMKCFLLELQVISLESGDASIHDTVENLIILANNSLSSNGNVTESGCKECEELEEKNIKEFLQSFVHIVQMFINTSTTTPAPRPPTPAPTIASQPLSLRPEACRPAAGGAVHTRGLDFACDIYIWAPLAGTCGVLLLSLVITLYC

SEQ ID NO: 2830 - protein, 722 aa, synthetic construct
  REGION 1..722: note = Synthetic
MALPVTALLLPLALLLHAARPQTVVTQEPSFSVSPGGTVTLTCGLTSGSVSTSYYPNWYQQTPGQAPRTLIYSTNIRSSGVPDRFSGSILGNKAALTITGAQADDESDYYCVLYMGSGMFIFGSGTKVTVLGSTSGSGKPGSGEGSTKGQVQLVESGGGVVQPGRSLRLSCAASGFTFSNYGMHWVRQAPGKGLEWMAVIWSDGHNKYYADSVKGRFTISRDNSKNTLYLQMNSLRAEDTAVYYCARAQLERRYFYYMDVWGKGTTVTVSSAAATTTPAPRPPTPAPTIASQPLSLRPEACRPAAGGAVHTRGLDFACDIYIWAPLAGTCGVLLLSLVITLYCKRGRKKLLYIFKQPFMRPVQTTQEEDGCSCRFPEEEEGGCELRVKFSRSADAPAYQQGQNQLYNELNLGRREEYDVLDKRRGRDPEMGGKPRRKNPQEGLYNELQKDKMAEAYSEIGMKGERRRGKGHDGLYQGLSTATKDTYDALHMQALPPRGSGEGRGSLLTCGDVEENPGPMALPVTALLLPLALLLHAARPNWVNVISDLKKIEDLIQSMHIDATLYTESDVHPSCKVTAMKCFLLELQVISLESGDASIHDTVENLIILANNSLSSNGNVTESGCKECEELEEKNIKEFLQSFVHIVQMFINTSTTTPAPRPPTPAPTIASQPLSLRPEACRPAAGGAVHTRGLDFACDIYIWAPLAGTCGVLLLSLVITLYC

SEQ ID NO: 2831 - protein, 722 aa, synthetic construct
  REGION 1..722: note = Synthetic
MALPVTALLLPLALLLHAARPDIQMTQSPSSLSASVGDRVTITCRASQGISSWLAWYQQKPEKAPKSLIYAASSLQGGVPSRFSGSGSGTDFTLTISSLQPEDFATYYCQQYDSYPYTFGQGTKLEIKGSTSGSGKPGSGEGSTKGQVQLVQSGAEVKKPGASVKVSCKASGYTFTSYDINWVRQATGQGLEWMGWMIPNSGDTGSAQKFQGRVTMTRNTSIGTAYMELSSLRSEDTAVYYCARGGYCNSTSCYYYYMDVWGKGTTVTVSSAAATTTPAPRPPTPAPTIASQPLSLRPEACRPAAGGAVHTRGLDFACDIYIWAPLAGTCGVLLLSLVITLYCKRGRKKLLYIFKQPFMRPVQTTQEEDGCSCRFPEEEEGGCELRVKFSRSADAPAYQQGQNQLYNELNLGRREEYDVLDKRRGRDPEMGGKPRRKNPQEGLYNELQKDKMAEAYSEIGMKGERRRGKGHDGLYQGLSTATKDTYDALHMQALPPRGSGEGRGSLLTCGDVEENPGPMALPVTALLLPLALLLHAARPNWVNVISDLKKIEDLIQSMHIDATLYTESDVHPSCKVTAMKCFLLELQVISLESGDASIHDTVENLIILANNSLSSNGNVTESGCKECEELEEKNIKEFLQSFVHIVQMFINTSTTTPAPRPPTPAPTIASQPLSLRPEACRPAAGGAVHTRGLDFACDIYIWAPLAGTCGVLLLSLVITLYC

SEQ ID NO: 2832 - protein, 723 aa, synthetic construct
  REGION 1..723: note = Synthetic
MALPVTALLLPLALLLHAARPDIQVTQSPTFLSASVGDRVTITCRASQGISSYLAWYQQKPGKAPKLLIYGASTLQSGVPSRFSGSGSGTEFTLTISSLQPEDFATYYCQQLNSYPWTFGQGTKVEIKGSTSGSGKPGSGEGSTKGQVQLVQSGAEVKKPGASVKVSCKASGYTFTSYDINWVRQATGQGLEWMGWMNPNSGNTVYAQKFQGRVTMTRNTSISTAYMELSSLRSEDTAVYYCARGGDFWSGYHDYYYYMDVWGKGTTVTVSSAAATTTPAPRPPTPAPTIASQPLSLRPEACRPAAGGAVHTRGLDFACDIYIWAPLAGTCGVLLLSLVITLYCKRGRKKLLYIFKQPFMRPVQTTQEEDGCSCRFPEEEEGGCELRVKFSRSADAPAYQQGQNQLYNELNLGRREEYDVLDKRRGRDPEMGGKPRRKNPQEGLYNELQKDKMAEAYSEIGMKGERRRGKGHDGLYQGLSTATKDTYDALHMQALPPRGSGEGRGSLLTCGDVEENPGPMALPVTALLLPLALLLHAARPNWVNVISDLKKIEDLIQSMHIDATLYTESDVHPSCKVTAMKCFLLELQVISLESGDASIHDTVENLIILANNSLSSNGNVTESGCKECEELEEKNIKEFLQSFVHIVQMFINTSTTTPAPRPPTPAPTIASQPLSLRPEACRPAAGGAVHTRGLDFACDIYIWAPLAGTCGVLLLSLVITLYC

SEQ ID NO: 2833 - protein, 721 aa, synthetic construct
  REGION 1..721: note = Synthetic
MALPVTALLLPLALLLHAARPSYELTQPPSVSVSPGQTASITCSGDKLGDKYACWYQQKPGQSPVLVIYQDSKRPSGIPERFSGSNSGNTATLTISGTQAMDEADYYCQAWDSSTAVFGGGTQLTALGSTSGSGKPGSGEGSTKGQVQLQESGPGLVKPSETLSLTCTVSGGSISSYYWSWIRQPAGKGLEWIGRIYTSGSTNYNPSLKSRVTMSVDTSKNQFSLKLSSVTAADTAVYYCAREEYQLLPALYYYYYMDVWGKGTTVTVSSAAATTTPAPRPPTPAPTIASQPLSLRPEACRPAAGGAVHTRGLDFACDIYIWAPLAGTCGVLLLSLVITLYCKRGRKKLLYIFKQPFMRPVQTTQEEDGCSCRFPEEEEGGCELRVKFSRSADAPAYQQGQNQLYNELNLGRREEYDVLDKRRGRDPEMGGKPRRKNPQEGLYNELQKDKMAEAYSEIGMKGERRRGKGHDGLYQGLSTATKDTYDALHMQALPPRGSGEGRGSLLTCGDVEENPGPMALPVTALLLPLALLLHAARPNWVNVISDLKKIEDLIQSMHIDATLYTESDVHPSCKVTAMKCFLLELQVISLESGDASIHDTVENLIILANNSLSSNGNVTESGCKECEELEEKNIKEFLQSFVHIVQMFINTSTTTPAPRPPTPAPTIASQPLSLRPEACRPAAGGAVHTRGLDFACDIYIWAPLAGTCGVLLLSLVITLYC

SEQ ID NO: 2834 - protein, 722 aa, synthetic construct
  REGION 1..722: note = Synthetic
MALPVTALLLPLALLLHAARPQTVVTQEPSFSVSPGGTVTLTCGLTSGSVSTSYYPNWYQQTPGQAPRTLIYSTNIRSSGVPDRFSGSILGNKAALTITGAQADDESDYYCVLYMGSGMFIFGSGTKVTVLGSTSGSGKPGSGEGSTKGQVQLVESGGGVVQPGRSLRLSCAATGFTFSSYGMHWVRQAPGKGLEWMVVIWSDGHNKYYADSVKGRFTISRDNSKNTLYLQMNSLRAEDTAVYYCARAQLERRYFYYMDVWGKGTTVTVSSAAATTTPAPRPPTPAPTIASQPLSLRPEACRPAAGGAVHTRGLDFACDIYIWAPLAGTCGVLLLSLVITLYCKRGRKKLLYIFKQPFMRPVQTTQEEDGCSCRFPEEEEGGCELRVKFSRSADAPAYQQGQNQLYNELNLGRREEYDVLDKRRGRDPEMGGKPRRKNPQEGLYNELQKDKMAEAYSEIGMKGERRRGKGHDGLYQGLSTATKDTYDALHMQALPPRGSGEGRGSLLTCGDVEENPGPMALPVTALLLPLALLLHAARPNWVNVISDLKKIEDLIQSMHIDATLYTESDVHPSCKVTAMKCFLLELQVISLESGDASIHDTVENLIILANNSLSSNGNVTESGCKECEELEEKNIKEFLQSFVHIVQMFINTSTTTPAPRPPTPAPTIASQPLSLRPEACRPAAGGAVHTRGLDFACDIYIWAPLAGTCGVLLLSLVITLYC

SEQ ID NO: 2835 - protein, 722 aa, synthetic construct
  REGION 1..722: note = Synthetic
MALPVTALLLPLALLLHAARPEIVLTQSPDFQSVTPKEKVTITCRASQSIGSSLHWYQQKPDQSPMLLIKFASQSISGVPSRFSGSGSGTDFTLTINSLEAEDAAAYYCHQSSSLPWTFGQGTKVEIKGSTSGSGKPGSGEGSTKGQVQLVESGGGVVQPGRSLRLSCAASGFTFTSYDMHWVRQAPGKGLEWVTIIWFDGSNKYYADSVKGRFTISRDNSKNTLYLQMNSLSAEDTAVYYCARGDNWNDRYYYYYYMDVWGKGTTVTVSSAAATTTPAPRPPTPAPTIASQPLSLRPEACRPAAGGAVHTRGLDFACDIYIWAPLAGTCGVLLLSLVITLYCKRGRKKLLYIFKQPFMRPVQTTQEEDGCSCRFPEEEEGGCELRVKFSRSADAPAYQQGQNQLYNELNLGRREEYDVLDKRRGRDPEMGGKPRRKNPQEGLYNELQKDKMAEAYSEIGMKGERRRGKGHDGLYQGLSTATKDTYDALHMQALPPRGSGEGRGSLLTCGDVEENPGPMALPVTALLLPLALLLHAARPNWVNVISDLKKIEDLIQSMHIDATLYTESDVHPSCKVTAMKCFLLELQVISLESGDASIHDTVENLIILANNSLSSNGNVTESGCKECEELEEKNIKEFLQSFVHIVQMFINTSTTTPAPRPPTPAPTIASQPLSLRPEACRPAAGGAVHTRGLDFACDIYIWAPLAGTCGVLLLSLVITLYC

SEQ ID NO: 2836 - protein, 727 aa, synthetic construct
  REGION 1..727: note = Synthetic
MALPVTALLLPLALLLHAARPDIVMTQPPLSSPVTLGQPASISCRSSQSLVHSDGNTYLSWLQQRPGQPPRLLIYKVSNRFSGVPDRFSGSGAGTDFTLKISRVEAEDVGVYYCTQATQFPHTFGQGTKLEIKGSTSGSGKPGSGEGSTKGQVQLVQSGAEVKKPGASVKVSCKASGYTFTSYGISWVRQAPGQGLEWMGWISAYNGHTDYTQKLQGRVTMTTDTSTTTAYMELRSLSSADTAVYYCVREVVLPTTDYYYFYMDVWGKGTTVTVSSAAATTTPAPRPPTPAPTIASQPLSLRPEACRPAAGGAVHTRGLDFACDIYIWAPLAGTCGVLLLSLVITLYCKRGRKKLLYIFKQPFMRPVQTTQEEDGCSCRFPEEEEGGCELRVKFSRSADAPAYQQGQNQLYNELNLGRREEYDVLDKRRGRDPEMGGKPRRKNPQEGLYNELQKDKMAEAYSEIGMKGERRRGKGHDGLYQGLSTATKDTYDALHMQALPPRGSGEGRGSLLTCGDVEENPGPMALPVTALLLPLALLLHAARPNWVNVISDLKKIEDLIQSMHIDATLYTESDVHPSCKVTAMKCFLLELQVISLESGDASIHDTVENLIILANNSLSSNGNVTESGCKECEELEEKNIKEFLQSFVHIVQMFINTSTTTPAPRPPTPAPTIASQPLSLRPEACRPAAGGAVHTRGLDFACDIYIWAPLAGTCGVLLLSLVITLYC

SEQ ID NO: 2837 - protein, 726 aa, synthetic construct
  REGION 1..726: note = Synthetic
MALPVTALLLPLALLLHAARPDIQMTQSPSSLSASVGDRVTITCRASQGISSWLAWYQQKPEKAPKSLIYAASSLQSGVPSRFSGSGSGTDFTLTISSLQPEDFATYYCQQYNSYPYTFGQGTKLEIKGSTSGSGKPGSGEGSTKGQVQLVQSGAEVKKPGASVKVSCKVSGYTLTELSMHWVRQAPGKGLEWMGGFDPEDGETIYAQKFQGRVTMTEDTSTDTAYMELSSLRSEDTAVYYCATGRITMVRGVIIPYYYYYMDVWGKGTTVTVSSAAATTTPAPRPPTPAPTIASQPLSLRPEACRPAAGGAVHTRGLDFACDIYIWAPLAGTCGVLLLSLVITLYCKRGRKKLLYIFKQPFMRPVQTTQEEDGCSCRFPEEEEGGCELRVKFSRSADAPAYQQGQNQLYNELNLGRREEYDVLDKRRGRDPEMGGKPRRKNPQEGLYNELQKDKMAEAYSEIGMKGERRRGKGHDGLYQGLSTATKDTYDALHMQALPPRGSGEGRGSLLTCGDVEENPGPMALPVTALLLPLALLLHAARPNWVNVISDLKKIEDLIQSMHIDATLYTESDVHPSCKVTAMKCFLLELQVISLESGDASIHDTVENLIILANNSLSSNGNVTESGCKECEELEEKNIKEFLQSFVHIVQMFINTSTTTPAPRPPTPAPTIASQPLSLRPEACRPAAGGAVHTRGLDFACDIYIWAPLAGTCGVLLLSLVITLYC

SEQ ID NO: 2838 - protein, 724 aa, synthetic construct
  REGION 1..724: note = Synthetic
MALPVTALLLPLALLLHAARPDIVMTQTPLSLSVTPGQPASISCKSSKSLLHSDGKTYLYWYLQKPGQPPQLLIYEVSNRFSGVPDRFSGSGSGTDFTLKISRVEAEDVGVYYCMQSIQFPWTFGQGTKVEIKGSTSGSGKPGSGEGSTKGQVQLVQSGTEVKKPGASVKVSCKASGYTFTNYGIGWVRQAPGQGLEWMGWIIAYNGYTKYAQILQGRVTMTTDTSTNTAYMELRSLRSDDTAVYYCARQQLGGDYHYYMDVWGKGTTVTVSSAAATTTPAPRPPTPAPTIASQPLSLRPEACRPAAGGAVHTRGLDFACDIYIWAPLAGTCGVLLLSLVITLYCKRGRKKLLYIFKQPFMRPVQTTQEEDGCSCRFPEEEEGGCELRVKFSRSADAPAYQQGQNQLYNELNLGRREEYDVLDKRRGRDPEMGGKPRRKNPQEGLYNELQKDKMAEAYSEIGMKGERRRGKGHDGLYQGLSTATKDTYDALHMQALPPRGSGEGRGSLLTCGDVEENPGPMALPVTALLLPLALLLHAARPNWVNVISDLKKIEDLIQSMHIDATLYTESDVHPSCKVTAMKCFLLELQVISLESGDASIHDTVENLIILANNSLSSNGNVTESGCKECEELEEKNIKEFLQSFVHIVQMFINTSTTTPAPRPPTPAPTIASQPLSLRPEACRPAAGGAVHTRGLDFACDIYIWAPLAGTCGVLLLSLVITLYC

SEQ ID NO: 2839 - protein, 724 aa, synthetic construct
  REGION 1..724: note = Synthetic
MALPVTALLLPLALLLHAARPDIVMTQTPLSLSVTPGQPASISCKSSKSLLHSDGKTYLYWYLQKPGQPPQLLIYEVSTRFSGVPDRFSGSGSGTDFTLKISRVEAEDVGVYYCMQSIQFPWTFGQGTKVEIKGSTSGSGKPGSGEGSTKGQVQLVQSGTEVKKPGASVKVSCKASGYTFTNYGIGWVRQAPGQGLEWMGWIIAYNGYTKYAQILQGRVTMTTDTSTNTAYMELRSLRSDDTAVYYCARQQLGGDYHYYMDVWGKGTTVTVSSAAATTTPAPRPPTPAPTIASQPLSLRPEACRPAAGGAVHTRGLDFACDIYIWAPLAGTCGVLLLSLVITLYCKRGRKKLLYIFKQPFMRPVQTTQEEDGCSCRFPEEEEGGCELRVKFSRSADAPAYQQGQNQLYNELNLGRREEYDVLDKRRGRDPEMGGKPRRKNPQEGLYNELQKDKMAEAYSEIGMKGERRRGKGHDGLYQGLSTATKDTYDALHMQALPPRGSGEGRGSLLTCGDVEENPGPMALPVTALLLPLALLLHAARPNWVNVISDLKKIEDLIQSMHIDATLYTESDVHPSCKVTAMKCFLLELQVISLESGDASIHDTVENLIILANNSLSSNGNVTESGCKECEELEEKNIKEFLQSFVHIVQMFINTSTTTPAPRPPTPAPTIASQPLSLRPEACRPAAGGAVHTRGLDFACDIYIWAPLAGTCGVLLLSLVITLYC

SEQ ID NO: 2840 - protein, 722 aa, synthetic construct
  REGION 1..722: note = Synthetic
MALPVTALLLPLALLLHAARPDIQMTQSPSSLSASVGDRVTITCRASQGISNWLAWYQQKPEKAPKSLIYAASSLQGGVPSRFSGSGSGTDFTLTISSLQPEDFATYYCQQYDSYPYTFGQGTKLEIKGSTSGSGKPGSGEGSTKGQVQLVQSGTEVKKPGASVKVSCKTSGYTFTSYDINWVRQATGQGLEWMGWMNPISGDTGSAQKFQGRVTMTRNTSIGTAYMELSSLRSEDTAVYYCARGGYCSSTSCYYYYMDVWGKGTTVTVSSAAATTTPAPRPPTPAPTIASQPLSLRPEACRPAAGGAVHTRGLDFACDIYIWAPLAGTCGVLLLSLVITLYCKRGRKKLLYIFKQPFMRPVQTTQEEDGCSCRFPEEEEGGCELRVKFSRSADAPAYQQGQNQLYNELNLGRREEYDVLDKRRGRDPEMGGKPRRKNPQEGLYNELQKDKMAEAYSEIGMKGERRRGKGHDGLYQGLSTATKDTYDALHMQALPPRGSGEGRGSLLTCGDVEENPGPMALPVTALLLPLALLLHAARPNWVNVISDLKKIEDLIQSMHIDATLYTESDVHPSCKVTAMKCFLLELQVISLESGDASIHDTVENLIILANNSLSSNGNVTESGCKECEELEEKNIKEFLQSFVHIVQMFINTSTTTPAPRPPTPAPTIASQPLSLRPEACRPAAGGAVHTRGLDFACDIYIWAPLAGTCGVLLLSLVITLYC

SEQ ID NO: 2841 - protein, 722 aa, synthetic construct
  REGION 1..722: note = Synthetic
MALPVTALLLPLALLLHAARPDIQMTQSPSSLSASVGDRVTITCRASQGISSWLAWYQQKPEKAPKSLIYAASSLQGGVPSRFSGSGSGTDFTLTISSLQPEDFATYYCQQYDSYPYTFGQGTKLEIKGSTSGSGKPGSGEGSTKGQVQLVQSGAEVKKPGASVKVSCKASGYTFTSYDINWVRQATGQGLEWMGWMIPNSGDTGSAQKFQGRVTMTRNTSISTAYMELSSLRSEDTAVYYCARGGYCNSTSCYYYYMDVWGKGTTVTVSSAAATTTPAPRPPTPAPTIASQPLSLRPEACRPAAGGAVHTRGLDFACDIYIWAPLAGTCGVLLLSLVITLYCKRGRKKLLYIFKQPFMRPVQTTQEEDGCSCRFPEEEEGGCELRVKFSRSADAPAYQQGQNQLYNELNLGRREEYDVLDKRRGRDPEMGGKPRRKNPQEGLYNELQKDKMAEAYSEIGMKGERRRGKGHDGLYQGLSTATKDTYDALHMQALPPRGSGEGRGSLLTCGDVEENPGPMALPVTALLLPLALLLHAARPNWVNVISDLKKIEDLIQSMHIDATLYTESDVHPSCKVTAMKCFLLELQVISLESGDASIHDTVENLIILANNSLSSNGNVTESGCKECEELEEKNIKEFLQSFVHIVQMFINTSTTTPAPRPPTPAPTIASQPLSLRPEACRPAAGGAVHTRGLDFACDIYIWAPLAGTCGVLLLSLVITLYC

SEQ ID NO: 2842 - protein, 723 aa, synthetic construct
  REGION 1..723: note = Synthetic
MALPVTALLLPLALLLHAARPEIVLTQSPGTLSLSPGERATLSCRASQSVSSSYLAWYQQKPGQAPRLLIYGASSRATGIPDRFSDSGSGTDFTLTISRLEPEDFAVYYCQHYGSSPPRITFGPGTKVDIKGSTSGSGKPGSGEGSTKGEVQLLESGGGLVQPGGSLRLSCAASGFTFSSYVMNWVRQAPGKGLEWVSSVSGSGNNSFYADSVKGRFTISRDNSKNTLYLQMNSLRAEDTAVYYCASRSSSYLYYYYYMDVWGKGTTVTVSSAAATTTPAPRPPTPAPTIASQPLSLRPEACRPAAGGAVHTRGLDFACDIYIWAPLAGTCGVLLLSLVITLYCKRGRKKLLYIFKQPFMRPVQTTQEEDGCSCRFPEEEEGGCELRVKFSRSADAPAYQQGQNQLYNELNLGRREEYDVLDKRRGRDPEMGGKPRRKNPQEGLYNELQKDKMAEAYSEIGMKGERRRGKGHDGLYQGLSTATKDTYDALHMQALPPRGSGEGRGSLLTCGDVEENPGPMALPVTALLLPLALLLHAARPNWVNVISDLKKIEDLIQSMHIDATLYTESDVHPSCKVTAMKCFLLELQVISLESGDASIHDTVENLIILANNSLSSNGNVTESGCKECEELEEKNIKEFLQSFVHIVQMFINTSTTTPAPRPPTPAPTIASQPLSLRPEACRPAAGGAVHTRGLDFACDIYIWAPLAGTCGVLLLSLVITLYC

SEQ ID NO: 2843 - DNA, 2166 bp, synthetic construct
  misc_feature 1..2166: note = Synthetic
  source 1..2166: mol_type = other DNA
atggccttaccagtgaccgccttgctcctgccgctggccttgctgctccacgccgccaggccggaaattgtgctgactcagtctccagactttcagtctgtgactccaaaggagaaagtcaccatcacctgccgggccagtcagaccattggcagtagcttacactggtaccagcagaaaccagatcagtctccaaagctcctcatcaagcatgcttcccagtccttctcaggggtcccctcgaggttcagtggcagtggatctgggacagatttcaccctcaccgtcaatagcctggaagctgaagatgctgcaacgtattactgtcatcagagtagtagtttaccgtggacgttcggccaagggaccaaggtggaaatcaaaggcagcaccagcggcagcggcaagcccggctccggagagggcagcaccaagggccaggtgcagctggtggagtctgggggaggcgtggtccagcctgggaggtccctgagactttcctgtgcagcgtctggattcaccttcagcagtcatgacatgcactgggtccgccaggctccaggcaaggggctggactgggtggcagttatatggagtgatggaaataaaaaatactatgtagactccgcgaagggccggttcaccatctccagagacaattccaagaacacggtgtatctgcaaatgaacagcctgagagccgaggacacggctatatattactgtgcgagaggtgacaactggaacgacgaacactcctactattactacatggacgtctggggcaaggggaccacggtcaccgtctcctcagcggccgcaaccacgacgccagcgccgcggccaccaacaccggcgcccaccatcgcgtcgcagcccctgtccctgcgcccagaggcgtgccggccagcggcggggggcgcagtgcacacgagggggctggacttcgcctgtgatatctacatctgggcgcccttggccgggacttgtggggtccttctcctgtcactggttatcaccctttactgcaaacggggcagaaagaaactcctgtatatattcaaacaaccatttatgagaccagtacaaactactcaagaggaagatggctgtagctgccgatttccagaagaagaagaaggaggatgtgaactgagagtgaagttcagcaggagcgcagacgcccccgcgtaccagcagggccagaaccagctctataacgagctcaatctaggacgaagagaggagtacgatgttttggacaagagacgtggccgggaccctgagatggggggaaagccgagaaggaagaaccctcaggaaggcctgtacaatgaactgcagaaagataagatggcggaggcctacagtgagattgggatgaaaggcgagcgccggaggggcaaggggcacgatggcctttaccagggtctcagtacagccaccaaggacacctacgacgcccttcacatgcaggccctgccccctcgcggctctggcgagggaaggggttccctgcttacttgcggcgacgtcgaagagaatcccggtccgatggccctcccagtaactgccctccttttgcccctcgcactccttcttcatgccgctcgccccaactgggtcaacgtgattagcgatttgaagaaaatcgaggaccttatacagtctatgcatattgacgctacactgtatactgagagtgatgtacacccgtcctgtaaggtaacggccatgaaatgctttcttctggagctccaggtcatcagcttggagtctggggacgcaagcatccacgatacggttgaaaacctcatcatccttgcgaacaactctctctcatctaatggaaacgttacagagagtgggtgtaaggagtgcgaagagttggaagaaaaaaacatcaaagaatttcttcaatccttcgttcacatagtgcaaatgttcattaacacgtccactaccacacccgccccgaggccacctacgccggcaccgactatcgccagtcaacccctctctctgcgccccgaggcttgccggcctgcggctggtggggcggtccacacccggggcctggattttgcgtgcgatatatacatctgggcacctcttgccggcacctgcggagtgctgcttctctcactcgttattacgctgtactgc

SEQ ID NO: 2844 - DNA, 2166 bp, synthetic construct
  misc_feature 1..2166: note = Synthetic
  source 1..2166: mol_type = other DNA
atggccttaccagtgaccgccttgctcctgccgctggccttgctgctccacgccgccaggccggaaattgtgctgactcagtctccagactttcagtctgtgactccaaaggagaaagtcaccatcacctgccgggccagtcagaccattggcagtagcttacactggtaccagcagaaaccagatcagtctccaaagctcctcatcaagcatgcttcccagtccttctcaggggtcccctcgaggttcagtggcagtggatctgggacagatttcaccctcaccgtcaatagcctggaagctgaagatgctgcaacgtattactgtcatcagagtagtagtttaccgtggacgttcggccaagggaccaaggtggaaatcaaaggcagcaccagcggcagcggcaagcccggctccggagagggcagcaccaagggccaggtgcagctggtggagtctgggggaggcgtggtccagcctgggaggtccctgagactttcctgtgcagcgtctggattcaccttcagtagtcatgacatgcactgggtccgccaggctccaggcaaggggctggactgggtggcagttatatggagtgatggaaataataaatactatgcagactccgcgaagggccggttcaccatctccagagacaattccaagaacacggtgtatctgcaaatgaacagcctgagagccgaggacacggctatatattactgtgcgagaggtgacaactggaacgacgaacactcctactattactacatggacgtctggggcaaggggaccacggtcaccgtctcctcagcggccgcaaccacgacgccagcgccgcggccaccaacaccggcgcccaccatcgcgtcgcagcccctgtccctgcgcccagaggcgtgccggccagcggcggggggcgcagtgcacacgagggggctggacttcgcctgtgatatctacatctgggcgcccttggccgggacttgtggggtccttctcctgtcactggttatcaccctttactgcaaacggggcagaaagaaactcctgtatatattcaaacaaccatttatgagaccagtacaaactactcaagaggaagatggctgtagctgccgatttccagaagaagaagaaggaggatgtgaactgagagtgaagttcagcaggagcgcagacgcccccgcgtaccagcagggccagaaccagctctataacgagctcaatctaggacgaagagaggagtacgatgttttggacaagagacgtggccgggaccctgagatggggggaaagccgagaaggaagaaccctcaggaaggcctgtacaatgaactgcagaaagataagatggcggaggcctacagtgagattgggatgaaaggcgagcgccggaggggcaaggggcacgatggcctttaccagggtctcagtacagccaccaaggacacctacgacgcccttcacatgcaggccctgccccctcgcggctctggcgagggaaggggttccctgcttacttgcggcgacgtcgaagagaatcccggtccgatggccctcccagtaactgccctccttttgcccctcgcactccttcttcatgccgctcgccccaactgggtcaacgtgattagcgatttgaagaaaatcgaggaccttatacagtctatgcatattgacgctacactgtatactgagagtgatgtacacccgtcctgtaaggtaacggccatgaaatgctttcttctggagctccaggtcatcagcttggagtctggggacgcaagcatccacgatacggttgaaaacctcatcatccttgcgaacaactctctctcatctaatggaaacgttacagagagtgggtgtaaggagtgcgaagagttggaagaaaaaaacatcaaagaatttcttcaatccttcgttcacatagtgcaaatgttcattaacacgtccactaccacacccgccccgaggccacctacgccggcaccgactatcgccagtcaacccctctctctgcgccccgaggcttgccggcctgcggctggtggggcggtccacacccggggcctggattttgcgtgcgatatatacatctgggcacctcttgccggcacctgcggagtgctgcttctctcactcgttattacgctgtactgc

SEQ ID NO: 2845 - DNA, 2163 bp, synthetic construct
  misc_feature 1..2163: note = Synthetic
  source 1..2163: mol_type = other DNA
atggccttaccagtgaccgccttgctcctgccgctggccttgctgctccacgccgccaggccggacatacagatgacccagtctccatcctccctgtctgcatctgtaggagacagagtcaccatcacttgccgggcaagccagagcattagcaactatttaaattggtatcaccagaaaccagggaaagcccctaagctcctgatctatgctgcatccagtttggaaagtggggtcccatcaaggttcagtggcagtggatctgggacagatttcactctcaccatcagcagtctgcaacctgaagattttgcaacttactactgtcaacagagttacagtaacccgctcactttcggcggagggaccaaggtggagagcaaaggcagcaccagcggcagcggcaagcccggctccggagagggcagcaccaagggccagcttcagctggtgcagtctggagctgaggtgaagaagcctggggcctcagtgaaggtctcctgcaaggcttctggttacacctttaccaactatggtatcagctggttgcgacaggcccctggacaagggcttgagtggatgggatggatcagtggttacaatgataacacacactatgcacagaagttccagggcagagtcaccatgaccacagacacatccacgaccacagcctacatggaactgaggaacctgagatctgacgacacggccgtgtattactgtgcgagagatgggatagcagctcgtccagtctactactactacatggacgtctggggcaaagggaccacggtcaccgtctcctcagcggccgcaaccacgacgccagcgccgcggccaccaacaccggcgcccaccatcgcgtcgcagcccctgtccctgcgcccagaggcgtgccggccagcggcggggggcgcagtgcacacgagggggctggacttcgcctgtgatatctacatctgggcgcccttggccgggacttgtggggtccttctcctgtcactggttatcaccctttactgcaaacggggcagaaagaaactcctgtatatattcaaacaaccatttatgagaccagtacaaactactcaagaggaagatggctgtagctgccgatttccagaagaagaagaaggaggatgtgaactgagagtgaagttcagcaggagcgcagacgcccccgcgtaccagcagggccagaaccagctctataacgagctcaatctaggacgaagagaggagtacgatgttttggacaagagacgtggccgggaccctgagatggggggaaagccgagaaggaagaaccctcaggaaggcctgtacaatgaactgcagaaagataagatggcggaggcctacagtgagattgggatgaaaggcgagcgccggaggggcaaggggcacgatggcctttaccagggtctcagtacagccaccaaggacacctacgacgcccttcacatgcaggccctgccccctcgcggctctggcgagggaaggggttccctgcttacttgcggcgacgtcgaagagaatcccggtccgatggccctcccagtaactgccctccttttgcccctcgcactccttcttcatgccgctcgccccaactgggtcaacgtgattagcgatttgaagaaaatcgaggaccttatacagtctatgcatattgacgctacactgtatactgagagtgatgtacacccgtcctgtaaggtaacggccatgaaatgctttcttctggagctccaggtcatcagcttggagtctggggacgcaagcatccacgatacggttgaaaacctcatcatccttgcgaacaactctctctcatctaatggaaacgttacagagagtgggtgtaaggagtgcgaagagttggaagaaaaaaacatcaaagaatttcttcaatccttcgttcacatagtgcaaatgttcattaacacgtccactaccacacccgccccgaggccacctacgccggcaccgactatcgccagtcaacccctctctctgcgccccgaggcttgccggcctgcggctggtggggcggtccacacccggggcctggattttgcgtgcgatatatacatctgggcacctcttgccggcacctgcggagtgctgcttctctcactcgttattacgctgtactgc

SEQ ID NO: 2846 - DNA, 2166 bp, synthetic construct
  misc_feature 1..2166: note = Synthetic
  source 1..2166: mol_type = other DNA
atggccttaccagtgaccgccttgctcctgccgctggccttgctgctccacgccgccaggccggaaattgtgctgactcagtctccagactttcagtctgtgactccaaaggagaaagtcaccatcacctgccgggccagtcagagcattggtagtagcttacactggtaccagcagaaaccagatcagtctccaaagctcctcatcaagtttgcttcccagtccttctcaggggtcccctcgaggttcagtggcagtggatctgggacagatttcaccctcaccatccatagcctggaagctgaagatgctgcaacgtattactgtcatcagagtggtagtttaccgtggacgttcggccaagggaccaaggtggaaatcaaaggcagcaccagcggcagcggcaagcccggctccggagagggcagcaccaagggccaggtgcagctggtggagtctgggggaggcgtggtccagcctgggaggtccctgagactctcctgtgtagcgtctggattcaccttcagtagcaatgacatatactgggtccgccaggccccaggcaaggggctggagtgggtggcagttatatggtatgatggaagtaataaatactatgcagactccgtgaagggccgattcaccatctccagagacaattccaagaacacgctgtatctgcaaatgaacagcctgagagccgaggacacggctgtgtattactgtgcgagaggtgacaactggaacgacgaacaccactaccactactacatggacgtctggggcaaagggaccacggtcaccgtctcctcagcggccgcaaccacgacgccagcgccgcggccaccaacaccggcgcccaccatcgcgtcgcagcccctgtccctgcgcccagaggcgtgccggccagcggcggggggcgcagtgcacacgagggggctggacttcgcctgtgatatctacatctgggcgcccttggccgggacttgtggggtccttctcctgtcactggttatcaccctttactgcaaacggggcagaaagaaactcctgtatatattcaaacaaccatttatgagaccagtacaaactactcaagaggaagatggctgtagctgccgatttccagaagaagaagaaggaggatgtgaactgagagtgaagttcagcaggagcgcagacgcccccgcgtaccagcagggccagaaccagctctataacgagctcaatctaggacgaagagaggagtacgatgttttggacaagagacgtggccgggaccctgagatggggggaaagccgagaaggaagaaccctcaggaaggcctgtacaatgaactgcagaaagataagatggcggaggcctacagtgagattgggatgaaaggcgagcgccggaggggcaaggggcacgatggcctttaccagggtctcagtacagccaccaaggacacctacgacgcccttcacatgcaggccctgccccctcgcggctctggcgagggaaggggttccctgcttacttgcggcgacgtcgaagagaatcccggtccgatggccctcccagtaactgccctccttttgcccctcgcactccttcttcatgccgctcgccccaactgggtcaacgtgattagcgatttgaagaaaatcgaggaccttatacagtctatgcatattgacgctacactgtatactgagagtgatgtacacccgtcctgtaaggtaacggccatgaaatgctttcttctggagctccaggtcatcagcttggagtctggggacgcaagcatccacgatacggttgaaaacctcatcatccttgcgaacaactctctctcatctaatggaaacgttacagagagtgggtgtaaggagtgcgaagagttggaagaaaaaaacatcaaagaatttcttcaatccttcgttcacatagtgcaaatgttcattaacacgtccactaccacacccgccccgaggccacctacgccggcaccgactatcgccagtcaacccctctctctgcgccccgaggcttgccggcctgcggctggtggggcggtccacacccggggcctggattttgcgtgcgatatatacatctgggcacctcttgccggcacctgcggagtgctgcttctctcactcgttattacgctgtactgc

SEQ ID NO: 2847 - DNA, 2146 bp, synthetic construct
  misc_feature 1..2146: note = Synthetic
  source 1..2146: mol_type = other DNA
atggccttaccagtgaccgccttgctcctgccgctggccttgctgctccacgccgccaggccgggtgacccaggagccatcgttctcagtgtcccctggagggacagtcacactcacttgtggcttgagctctggctcagtctctactagttactaccccagctggtaccagcagaccccaggccaggctccacgcacgctcatctacagcacaaacattcgctcttctggggtccctgatcgcttctctggctccatccttgggaacaaagctgccctcaccatcacgggggcccaggcagatgatgaatctgattattactgtgtgctgtatatgggtagtgacattgtggtattcggcggagggaccaagctgaccgtcctaggcagcaccagcggcagcggcaagcccggctccggagagggcagcaccaagggccaggtgcagttggtggagtctgggggaggcgtggtccagcctgggaggtccctgagactctcctgtgcagcctctggattcaccttcagtagctatggcatgcactgggtccgccaggctccaggcaaggggctggagtgggtggcagttatatcatatgatggaagtaataaatactatgcagactccgtgaagggccgattcaccatctccagggacaattccaagaccacgctgtatctgcaaatgaacagcctgagagctgaggacacggctgtgtattactgtgcgagagatcactactactactacatggacgtctggggcaaagggaccacggtcaccgtctcctcagcggccgcaaccacgacgccagcgccgcggccaccaacaccggcgcccaccatcgcgtcgcagcccctgtccctgcgcccagaggcgtgccggccagcggcggggggcgcagtgcacacgagggggctggacttcgcctgtgatatctacatctgggcgcccttggccgggacttgtggggtccttctcctgtcactggttatcaccctttactgcaaacggggcagaaagaaactcctgtatatattcaaacaaccatttatgagaccagtacaaactactcaagaggaagatggctgtagctgccgatttccagaagaagaagaaggaggatgtgaactgagagtgaagttcagcaggagcgcagacgcccccgcgtaccagcagggccagaaccagctctataacgagctcaatctaggacgaagagaggagtacgatgttttggacaagagacgtggccgggaccctgagatggggggaaagccgagaaggaagaaccctcaggaaggcctgtacaatgaactgcagaaagataagatggcggaggcctacagtgagattgggatgaaaggcgagcgccggaggggcaaggggcacgatggcctttaccagggtctcagtacagccaccaaggacacctacgacgcccttcacatgcaggccctgccccctcgcggctctggcgagggaaggggttccctgcttacttgcggcgacgtcgaagagaatcccggtccgatggccctcccagtaactgccctccttttgcccctcgcactccttcttcatgccgctcgccccaactgggtcaacgtgattagcgatttgaagaaaatcgaggaccttatacagtctatgcatattgacgctacactgtatactgagagtgatgtacacccgtcctgtaaggtaacggccatgaaatgctttcttctggagctccaggtcatcagcttggagtctggggacgcaagcatccacgatacggttgaaaacctcatcatccttgcgaacaactctctctcatctaatggaaacgttacagagagtgggtgtaaggagtgcgaagagttggaagaaaaaaacatcaaagaatttcttcaatccttcgttcacatagtgcaaatgttcattaacacgtccactaccacacccgccccgaggccacctacgccggcaccgactatcgccagtcaacccctctctctgcgccccgaggcttgccggcctgcggctggtggggcggtccacacccggggcctggattttgcgtgcgatatatacatctgggcacctcttgccggcacctgcggagtgctgcttctctcactcgttattacgctgtactgc

SEQ ID NO: 2848 - DNA, 2160 bp, synthetic construct
  misc_feature 1..2160: note = Synthetic
  source 1..2160: mol_type = other DNA
atggccttaccagtgaccgccttgctcctgccgctggccttgctgctccacgccgccaggccggaaattgtgttgacacagtctccagccaccctgtctttgtctccaggggaaagagccaccctctcctgcagggccagtcagagtgttagcagctactttgcctggtaccaacagaaacctggccaggctcccaggctcctcatctatgatgcatccaacagggccactggcatcccagccaggttcagtggcagtgggtctgggacagacttcactctcaccatcagcagcctggagcctgaagattttgcagtttattactgtcagcagcgtagcaactggcctctcactttcggcggagggaccaaggtggagatcaaaggcagcaccagcggcagcggcaagcccggctccggagagggcagcaccaagggccaactgcagctgcaggagtcgggcccaggactggtgaagccttcggagaccctgtccctcacctgcactgtctctggtggctccatcagcagtagtagttactactggggctggatccgccagcccccagggaaggggctggagtggattgggagtctctattatagtgggagcacctactacaacccgtccctcaagagtcgagtcaccatatccgttgacacgtccaagaaccagttctccctgaagctgagctctgtgaccgccgcagacacggctgtgtattactgtgcggccgtacaactggaacgacgtgggtacttctacatggacgtctggggcaaagggaccacggtcaccgtctcctcagcggccgcaaccacgacgccagcgccgcggccaccaacaccggcgcccaccatcgcgtcgcagcccctgtccctgcgcccagaggcgtgccggccagcggcggggggcgcagtgcacacgagggggctggacttcgcctgtgatatctacatctgggcgcccttggccgggacttgtggggtccttctcctgtcactggttatcaccctttactgcaaacggggcagaaagaaactcctgtatatattcaaacaaccatttatgagaccagtacaaactactcaagaggaagatggctgtagctgccgatttccagaagaagaagaaggaggatgtgaactgagagtgaagttcagcaggagcgcagacgcccccgcgtaccagcagggccagaaccagctctataacgagctcaatctaggacgaagagaggagtacgatgttttggacaagagacgtggccgggaccctgagatggggggaaagccgagaaggaagaaccctcaggaaggcctgtacaatgaactgcagaaagataagatggcggaggcctacagtgagattgggatgaaaggcgagcgccggaggggcaaggggcacgatggcctttaccagggtctcagtacagccaccaaggacacctacgacgcccttcacatgcaggccctgccccctcgcggctctggcgagggaaggggttccctgcttacttgcggcgacgtcgaagagaatcccggtccgatggccctcccagtaactgccctccttttgcccctcgcactccttcttcatgccgctcgccccaactgggtcaacgtgattagcgatttgaagaaaatcgaggaccttatacagtctatgcatattgacgctacactgtatactgagagtgatgtacacccgtcctgtaaggtaacggccatgaaatgctttcttctggagctccaggtcatcagcttggagtctggggacgcaagcatccacgatacggttgaaaacctcatcatccttgcgaacaactctctctcatctaatggaaacgttacagagagtgggtgtaaggagtgcgaagagttggaagaaaaaaacatcaaagaatttcttcaatccttcgttcacatagtgcaaatgttcattaacacgtccactaccacacccgccccgaggccacctacgccggcaccgactatcgccagtcaacccctctctctgcgccccgaggcttgccggcctgcggctggtggggcggtccacacccggggcctggattttgcgtgcgatatatacatctgggcacctcttgccggcacctgcggagtgctgcttctctcactcgttattacgctgtactgc

SEQ ID NO: 2849 - DNA, 2166 bp, synthetic construct
  misc_feature 1..2166: note = Synthetic
  source 1..2166: mol_type = other DNA
atggccttaccagtgaccgccttgctcctgccgctggccttgctgctccacgccgccaggccgcagactgtagtgacccaggaaccatcgttctcagtgtcccctggagggacagtcacactcacttgtggcttgacctctggctcagtctctactagttactaccccaactggtaccagcagaccccaggccaggctccacgcacgctcatctatagtacaaatattcgctcttctggggtccctgatcgcttctctggctccatccttgggaacaaagctgccctcaccatcacgggggcccaggcagatgatgaatctgattattactgtgtgctgtatatgggtagtggcatgtttattttcggcagtggaaccaaggtcactgtcctaggcagcaccagcggcagcggcaagcccggctccggagagggcagcaccaagggccaggtgcagctggtggagtctgggggaggcgtggtccagcctgggaggtccctgagactctcctgtgcagcatctggattcaccttcagtaactatggcatgcactgggtccgccaggctccaggcaaggggctggagtggatggcagttatatggtctgatggacataataaatactatgcagactccgtgaagggccgattcaccatctccagagacaattccaagaacacgctgtatctgcaaatgaacagcctgagagccgaggacacggctgtgtattactgtgcgagggcacaattggaacgacggtacttctactacatggacgtctggggcaaagggaccacggtcaccgtctcctcagcggccgcaaccacgacgccagcgccgcggccaccaacaccggcgcccaccatcgcgtcgcagcccctgtccctgcgcccagaggcgtgccggccagcggcggggggcgcagtgcacacgagggggctggacttcgcctgtgatatctacatctgggcgcccttggccgggacttgtggggtccttctcctgtcactggttatcaccctttactgcaaacggggcagaaagaaactcctgtatatattcaaacaaccatttatgagaccagtacaaactactcaagaggaagatggctgtagctgccgatttccagaagaagaagaaggaggatgtgaactgagagtgaagttcagcaggagcgcagacgcccccgcgtaccagcagggccagaaccagctctataacgagctcaatctaggacgaagagaggagtacgatgttttggacaagagacgtggccgggaccctgagatggggggaaagccgagaaggaagaaccctcaggaaggcctgtacaatgaactgcagaaagataagatggcggaggcctacagtgagattgggatgaaaggcgagcgccggaggggcaaggggcacgatggcctttaccagggtctcagtacagccaccaaggacacctacgacgcccttcacatgcaggccctgccccctcgcggctctggcgagggaaggggttccctgcttacttgcggcgacgtcgaagagaatcccggtccgatggccctcccagtaactgccctccttttgcccctcgcactccttcttcatgccgctcgccccaactgggtcaacgtgattagcgatttgaagaaaatcgaggaccttatacagtctatgcatattgacgctacactgtatactgagagtgatgtacacccgtcctgtaaggtaacggccatgaaatgctttcttctggagctccaggtcatcagcttggagtctggggacgcaagcatccacgatacggttgaaaacctcatcatccttgcgaacaactctctctcatctaatggaaacgttacagagagtgggtgtaaggagtgcgaagagttggaagaaaaaaacatcaaagaatttcttcaatccttcgttcacatagtgcaaatgttcattaacacgtccactaccacacccgccccgaggccacctacgccggcaccgactatcgccagtcaacccctctctctgcgccccgaggcttgccggcctgcggctggtggggcggtccacacccggggcctggattttgcgtgcgatatatacatctgggcacctcttgccggcacctgcggagtgctgcttctctcactcgttattacgctgtactgc

SEQ ID NO: 2850 - DNA, 2166 bp, synthetic construct
  misc_feature 1..2166: note = Synthetic
  source 1..2166: mol_type = other DNA
atggccttaccagtgaccgccttgctcctgccgctggccttgctgctccacgccgccaggccggacatccagatgacccagtctccatcctcactgtctgcatctgtaggagacagagtcaccatcacttgtcgggcgagtcagggtattagcagctggttagcctggtatcagcagaaaccagagaaagcccctaagtccctgatctatgctgcatccagtttacagggtggggtcccatcaaggttcagcggcagtggatctgggacagatttcactctcaccatcagcagcctgcagcctgaagattttgcaacttattactgccaacagtatgatagttacccgtacacttttggccaggggaccaagctggagatcaaaggcagcaccagcggcagcggcaagcccggctccggagagggcagcaccaagggccaggtgcagctggtgcagtctggggctgaggtgaagaagcctggggcctcagtgaaggtctcctgcaaggcttctggatacaccttcaccagttatgatatcaactgggtgcgacaggccactggacaagggcttgagtggatgggatggatgatccctaacagtggtgacacaggctctgcacagaagttccagggcagagtcaccatgaccaggaacacctccataggcacagcctacatggagctgagcagcctgagatctgaggacacggccgtttattactgtgcgagaggcggatattgtaatagtaccagttgctactactactacatggacgtctggggcaaagggaccacggtcaccgtctcctcagcggccgcaaccacgacgccagcgccgcggccaccaacaccggcgcccaccatcgcgtcgcagcccctgtccctgcgcccagaggcgtgccggccagcggcggggggcgcagtgcacacgagggggctggacttcgcctgtgatatctacatctgggcgcccttggccgggacttgtggggtccttctcctgtcactggttatcaccctttactgcaaacggggcagaaagaaactcctgtatatattcaaacaaccatttatgagaccagtacaaactactcaagaggaagatggctgtagctgccgatttccagaagaagaagaaggaggatgtgaactgagagtgaagttcagcaggagcgcagacgcccccgcgtaccagcagggccagaaccagctctataacgagctcaatctaggacgaagagaggagtacgatgttttggacaagagacgtggccgggaccctgagatggggggaaagccgagaaggaagaaccctcaggaaggcctgtacaatgaactgcagaaagataagatggcggaggcctacagtgagattgggatgaaaggcgagcgccggaggggcaaggggcacgatggcctttaccagggtctcagtacagccaccaaggacacctacgacgcccttcacatgcaggccctgccccctcgcggctctggcgagggaaggggttccctgcttacttgcggcgacgtcgaagagaatcccggtccgatggccctcccagtaactgccctccttttgcccctcgcactccttcttcatgccgctcgccccaactgggtcaacgtgattagcgatttgaagaaaatcgaggaccttatacagtctatgcatattgacgctacactgtatactgagagtgatgtacacccgtcctgtaaggtaacggccatgaaatgctttcttctggagctccaggtcatcagcttggagtctggggacgcaagcatccacgatacggttgaaaacctcatcatccttgcgaacaactctctctcatctaatggaaacgttacagagagtgggtgtaaggagtgcgaagagttggaagaaaaaaacatcaaagaatttcttcaatccttcgttcacatagtgcaaatgttcattaacacgtccactaccacacccgccccgaggccacctacgccggcaccgactatcgccagtcaacccctctctctgcgccccgaggcttgccggcctgcggctggtggggcggtccacacccggggcctggattttgcgtgcgatatatacatctgggcacctcttgccggcacctgcggagtgctgcttctctcactcgttattacgctgtactgc

SEQ ID NO: 2851 - DNA, 2169 bp, synthetic construct
  misc_feature 1..2169: note = Synthetic
  source 1..2169: mol_type = other DNA
atggccttaccagtgaccgccttgctcctgccgctggccttgctgctccacgccgccaggccggacatccaggtgacccagtctccaaccttcctgtctgcatctgtaggagacagagtcaccatcacttgccgggccagtcagggcattagcagttatttagcctggtatcagcaaaaaccagggaaagcccctaagctcctgatctatggtgcatccactttgcaaagtggggtcccatcaaggttcagcggcagtggatctgggacagaattcactctcacaatcagcagcctgcagcctgaagattttgcaacttattactgtcaacagcttaatagttacccgtggacgttcggccaagggaccaaggtggaaatcaaaggcagcaccagcggcagcggcaagcccggctccggagagggcagcaccaagggccaggtgcagctggtgcagtctggggctgaggtgaagaagcctggggcctcagtgaaggtctcctgcaaggcttctggatacaccttcaccagttatgatatcaactgggtgcgacaggccactggacaagggcttgagtggatgggatggatgaaccctaatagtggtaacacagtctatgcacagaagttccagggcagagtcaccatgaccaggaacacctccataagcacagcctacatggagctgagcagcctgagatctgaggacacggccgtgtattactgtgcgagaggaggcgatttttggagtggttaccatgactactactactacatggacgtctggggcaaagggaccacggtcaccgtctcctcagcggccgcaaccacgacgccagcgccgcggccaccaacaccggcgcccaccatcgcgtcgcagcccctgtccctgcgcccagaggcgtgccggccagcggcggggggcgcagtgcacacgagggggctggacttcgcctgtgatatctacatctgggcgcccttggccgggacttgtggggtccttctcctgtcactggttatcaccctttactgcaaacggggcagaaagaaactcctgtatatattcaaacaaccatttatgagaccagtacaaactactcaagaggaagatggctgtagctgccgatttccagaagaagaagaaggaggatgtgaactgagagtgaagttcagcaggagcgcagacgcccccgcgtaccagcagggccagaaccagctctataacgagctcaatctaggacgaagagaggagtacgatgttttggacaagagacgtggccgggaccctgagatggggggaaagccgagaaggaagaaccctcaggaaggcctgtacaatgaactgcagaaagataagatggcggaggcctacagtgagattgggatgaaaggcgagcgccggaggggcaaggggcacgatggcctttaccagggtctcagtacagccaccaaggacacctacgacgcccttcacatgcaggccctgccccctcgcggctctggcgagggaaggggttccctgcttacttgcggcgacgtcgaagagaatcccggtccgatggccctcccagtaactgccctccttttgcccctcgcactccttcttcatgccgctcgccccaactgggtcaacgtgattagcgatttgaagaaaatcgaggaccttatacagtctatgcatattgacgctacactgtatactgagagtgatgtacacccgtcctgtaaggtaacggccatgaaatgctttcttctggagctccaggtcatcagcttggagtctggggacgcaagcatccacgatacggttgaaaacctcatcatccttgcgaacaactctctctcatctaatggaaacgttacagagagtgggtgtaaggagtgcgaagagttggaagaaaaaaacatcaaagaatttcttcaatccttcgttcacatagtgcaaatgttcattaacacgtccactaccacacccgccccgaggccacctacgccggcaccgactatcgccagtcaacccctctctctgcgccccgaggcttgccggcctgcggctggtggggcggtccacacccggggcctggattttgcgtgcgatatatacatctgggcacctcttgccggcacctgcggagtgctgcttctctcactcgttattacgctgtactgc

SEQ ID NO: 2852 - DNA, 2163 bp, synthetic construct
  misc_feature 1..2163: note = Synthetic
  source 1..2163: mol_type = other DNA
atggccttaccagtgaccgccttgctcctgccgctggccttgctgctccacgccgccaggccgtcctatgagctgactcagccaccctcagtgtccgtgtccccaggacagacagccagcatcacctgctctggagataaattgggggataaatatgcttgctggtatcagcagaagccaggccagtcccctgtgctggtcatctatcaagatagcaagcggccctcagggatccctgagcgattctctggctccaactctgggaacacagccactctgaccatcagcgggacccaggctatggatgaggctgactattactgtcaggcgtgggacagcagcactgctgtgttcggaggaggcacccagctgaccgccctcggcagcaccagcggcagcggcaagcccggctccggagagggcagcaccaagggccaggtgcagctgcaggagtcgggcccaggactggtgaagccttcggagaccctgtccctcacctgcactgtctctggtggctccatcagtagttactactggagctggatccggcagcccgccgggaagggactggagtggattgggcgtatctataccagtgggagcaccaactacaacccctccctcaagagtcgagtcaccatgtcagtagacacgtccaagaaccagttctccctgaagctgagctctgtgaccgccgcggacacggccgtgtattactgtgcgagagaggagtaccagctgctaccggccctctactactactactacatggacgtctggggcaaagggaccacggtcaccgtctcctcagcggccgcaaccacgacgccagcgccgcggccaccaacaccggcgcccaccatcgcgtcgcagcccctgtccctgcgcccagaggcgtgccggccagcggcggggggcgcagtgcacacgagggggctggacttcgcctgtgatatctacatctgggcgcccttggccgggacttgtggggtccttctcctgtcactggttatcaccctttactgcaaacggggcagaaagaaactcctgtatatattcaaacaaccatttatgagaccagtacaaactactcaagaggaagatggctgtagctgccgatttccagaagaagaagaaggaggatgtgaactgagagtgaagttcagcaggagcgcagacgcccccgcgtaccagcagggccagaaccagctctataacgagctcaatctaggacgaagagaggagtacgatgttttggacaagagacgtggccgggaccctgagatggggggaaagccgagaaggaagaaccctcaggaaggcctgtacaatgaactgcagaaagataagatggcggaggcctacagtgagattgggatgaaaggcgagcgccggaggggcaaggggcacgatggcctttaccagggtctcagtacagccaccaaggacacctacgacgcccttcacatgcaggccctgccccctcgcggctctggcgagggaaggggttccctgcttacttgcggcgacgtcgaagagaatcccggtccgatggccctcccagtaactgccctccttttgcccctcgcactccttcttcatgccgctcgccccaactgggtcaacgtgattagcgatttgaagaaaatcgaggaccttatacagtctatgcatattgacgctacactgtatactgagagtgatgtacacccgtcctgtaaggtaacggccatgaaatgctttcttctggagctccaggtcatcagcttggagtctggggacgcaagcatccacgatacggttgaaaacctcatcatccttgcgaacaactctctctcatctaatggaaacgttacagagagtgggtgtaaggagtgcgaagagttggaagaaaaaaacatcaaagaatttcttcaatccttcgttcacatagtgcaaatgttcattaacacgtccactaccacacccgccccgaggccacctacgccggcaccgactatcgccagtcaacccctctctctgcgccccgaggcttgccggcctgcggctggtggggcggtccacacccggggcctggattttgcgtgcgatatatacatctgggcacctcttgccggcacctgcggagtgctgcttctctcactcgttattacgctgtactgc

SEQ ID NO: 2853 - DNA, 2166 bp, synthetic construct
  misc_feature 1..2166: note = Synthetic
  source 1..2166: mol_type = other DNA
atggccttaccagtgaccgccttgctcctgccgctggccttgctgctccacgccgccaggccgcagactgtagtgacccaggaaccatcgttctcagtgtcccctggagggacagtcacactcacttgtggcttgacctctggctcagtctctactagttactaccccaactggtaccagcagaccccaggccaggctccacgcacgctcatctacagcacaaatattcgctcttctggggtccctgatcgcttctctggctccatccttgggaacaaagctgccctcaccatcacgggggcccaggcagatgatgaatctgattattactgtgtgctgtatatgggtagtggcatgtttattttcggcagtggaaccaaggtcactgtcctaggcagcaccagcggcagcggcaagcccggctccggagagggcagcaccaagggccaggtgcagctggtggagtctgggggaggcgtggtccagcctgggaggtccctgagactctcctgtgcagcaactggattcaccttcagtagctatggcatgcactgggtccgccaggctccaggcaaggggctggagtggatggtagttatatggtctgatggacataataaatactatgcagactccgtgaagggccgattcaccatctccagagacaattccaagaacacgctgtatctgcaaatgaacagcctgagagccgaggacacggctgtgtattactgtgcgagggcacaactggaacgacggtacttctactacatggacgtctggggcaaagggaccacggtcaccgtctcctcagcggccgcaaccacgacgccagcgccgcggccaccaacaccggcgcccaccatcgcgtcgcagcccctgtccctgcgcccagaggcgtgccggccagcggcggggggcgcagtgcacacgagggggctggacttcgcctgtgatatctacatctgggcgcccttggccgggacttgtggggtccttctcctgtcactggttatcaccctttactgcaaacggggcagaaagaaactcctgtatatattcaaacaaccatttatgagaccagtacaaactactcaagaggaagatggctgtagctgccgatttccagaagaagaagaaggaggatgtgaactgagagtgaagttcagcaggagcgcagacgcccccgcgtaccagcagggccagaaccagctctataacgagctcaatctaggacgaagagaggagtacgatgttttggacaagagacgtggccgggaccctgagatggggggaaagccgagaaggaagaaccctcaggaaggcctgtacaatgaactgcagaaagataagatggcggaggcctacagtgagattgggatgaaaggcgagcgccggaggggcaaggggcacgatggcctttaccagggtctcagtacagccaccaaggacacctacgacgcccttcacatgcaggccctgccccctcgcggctctggcgagggaaggggttccctgcttacttgcggcgacgtcgaagagaatcccggtccgatggccctcccagtaactgccctccttttgcccctcgcactccttcttcatgccgctcgccccaactgggtcaacgtgattagcgatttgaagaaaatcgaggaccttatacagtctatgcatattgacgctacactgtatactgagagtgatgtacacccgtcctgtaaggtaacggccatgaaatgctttcttctggagctccaggtcatcagcttggagtctggggacgcaagcatccacgatacggttgaaaacctcatcatccttgcgaacaactctctctcatctaatggaaacgttacagagagtgggtgtaaggagtgcgaagagttggaagaaaaaaacatcaaagaatttcttcaatccttcgttcacatagtgcaaatgttcattaacacgtccactaccacacccgccccgaggccacctacgccggcaccgactatcgccagtcaacccctctctctgcgccccgaggcttgccggcctgcggctggtggggcggtccacacccggggcctggattttgcgtgcgatatatacatctgggcacctcttgccggcacctgcggagtgctgcttctctcactcgttattacgctgtactgc

SEQ ID NO: 2854 - DNA, 2166 bp, synthetic construct
  misc_feature 1..2166: note = Synthetic
  source 1..2166: mol_type = other DNA
atggccttaccagtgaccgccttgctcctgccgctggccttgctgctccacgccgccaggccggaaattgtgctgactcagtctccagactttcagtctgtgactccaaaggagaaagtcaccatcacctgccgggccagtcagagcattggtagtagcttacactggtaccagcagaaaccagatcagtctccaatgctcctcatcaagtttgcttcccagtccatctcaggggtcccctcgaggttcagtggcagtggatctgggacagatttcaccctcaccatcaatagcctggaagctgaagatgctgcagcgtattactgtcatcagagtagtagtttaccgtggacgttcggccaagggaccaaggtggaaatcaaaggcagcaccagcggcagcggcaagcccggctccggagagggcagcaccaagggccaggtgcagctggtggagtctgggggaggcgtggtccagcctgggaggtccctgagactctcctgtgcagcgtctggattcaccttcactagttatgacatgcactgggtccgccaggctccaggcaaggggctggagtgggtgacaattatatggtttgatggaagtaataaatactatgcagactccgtgaagggccgattcaccatctccagagacaattccaagaacacgctgtatctgcaaatgaacagcctgagcgccgaggacacggctgtgtattactgtgcgagaggagacaactggaacgaccggtactactactactactacatggacgtctggggcaaagggaccacggtcaccgtctcctcagcggccgcaaccacgacgccagcgccgcggccaccaacaccggcgcccaccatcgcgtcgcagcccctgtccctgcgcccagaggcgtgccggccagcggcggggggcgcagtgcacacgagggggctggacttcgcctgtgatatctacatctgggcgcccttggccgggacttgtggggtccttctcctgtcactggttatcaccctttactgcaaacggggcagaaagaaactcctgtatatattcaaacaaccatttatgagaccagtacaaactactcaagaggaagatggctgtagctgccgatttccagaagaagaagaaggaggatgtgaactgagagtgaagttcagcaggagcgcagacgcccccgcgtaccagcagggccagaaccagctctataacgagctcaatctaggacgaagagaggagtacgatgttttggacaagagacgtggccgggaccctgagatggggggaaagccgagaaggaagaaccctcaggaaggcctgtacaatgaactgcagaaagataagatggcggaggcctacagtgagattgggatgaaaggcgagcgccggaggggcaaggggcacgatggcctttaccagggtctcagtacagccaccaaggacacctacgacgcccttcacatgcaggccctgccccctcgcggctctggcgagggaaggggttccctgcttacttgcggcgacgtcgaagagaatcccggtccgatggccctcccagtaactgccctccttttgcccctcgcactccttcttcatgccgctcgccccaactgggtcaacgtgattagcgatttgaagaaaatcgaggaccttatacagtctatgcatattgacgctacactgtatactgagagtgatgtacacccgtcctgtaaggtaacggccatgaaatgctttcttctggagctccaggtcatcagcttggagtctggggacgcaagcatccacgatacggttgaaaacctcatcatccttgcgaacaactctctctcatctaatggaaacgttacagagagtgggtgtaaggagtgcgaagagttggaagaaaaaaacatcaaagaatttcttcaatccttcgttcacatagtgcaaatgttcattaacacgtccactaccacacccgccccgaggccacctacgccggcaccgactatcgccagtcaacccctctctctgcgccccgaggcttgccggcctgcggctggtggggcggtccacacccggggcctggattttgcgtgcgatatatacatctgggcacctcttgccggcacctgcggagtgctgcttctctcactcgttattacgctgtactgc

SEQ ID NO: 2855 - DNA, 2181 bp, synthetic construct
  misc_feature 1..2181: note = Synthetic
  source 1..2181: mol_type = other DNA
atggccttaccagtgaccgccttgctcctgccgctggccttgctgctccacgccgccaggccggatattgtgatgacccagcctccactctcctcgcctgtcacccttggacagccggcctccatctcctgcaggtctagtcaaagcctcgtacacagtgatggaaacacctacttgagttggcttcagcagaggccaggccagcctccaagactcctaatttataaggtttctaaccggttctctggggtcccagacagattcagtggcagtggggcagggacagatttcacactgaaaatcagcagggtggaagctgaggatgtcggggtttattactgcacgcaagctacacaatttcctcacacttttggccaggggaccaagctggagatcaaaggcagcaccagcggcagcggcaagcccggctccggagagggcagcaccaagggccaggttcagctggtgcagtctggagctgaggtgaagaagcctggggcctcagtgaaggtctcctgcaaggcttctggttacacctttaccagctatggtatcagctgggtgcgacaggcccctggacaagggcttgagtggatggggtggatcagcgcttacaatggtcacacagactatacacagaaactccagggcagagtcaccatgaccacagacacatccacgaccacagcctacatggaactgaggagcctgagctctgccgacacggccgtgtattactgtgtgagagaagtggtacttcccaccacggactactactacttttacatggacgtctggggcaaagggaccacggtcaccgtctcctcagcggccgcaaccacgacgccagcgccgcggccaccaacaccggcgcccaccatcgcgtcgcagcccctgtccctgcgcccagaggcgtgccggccagcggcggggggcgcagtgcacacgagggggctggacttcgcctgtgatatctacatctgggcgcccttggccgggacttgtggggtccttctcctgtcactggttatcaccctttactgcaaacggggcagaaagaaactcctgtatatattcaaacaaccatttatgagaccagtacaaactactcaagaggaagatggctgtagctgccgatttccagaagaagaagaaggaggatgtgaactgagagtgaagttcagcaggagcgcagacgcccccgcgtaccagcagggccagaaccagctctataacgagctcaatctaggacgaagagaggagtacgatgttttggacaagagacgtggccgggaccctgagatggggggaaagccgagaaggaagaaccctcaggaaggcctgtacaatgaactgcagaaagataagatggcggaggcctacagtgagattgggatgaaaggcgagcgccggaggggcaaggggcacgatggcctttaccagggtctcagtacagccaccaaggacacctacgacgcccttcacatgcaggccctgccccctcgcggctctggcgagggaaggggttccctgcttacttgcggcgacgtcgaagagaatcccggtccgatggccctcccagtaactgccctccttttgcccctcgcactccttcttcatgccgctcgccccaactgggtcaacgtgattagcgatttgaagaaaatcgaggaccttatacagtctatgcatattgacgctacactgtatactgagagtgatgtacacccgtcctgtaaggtaacggccatgaaatgctttcttctggagctccaggtcatcagcttggagtctggggacgcaagcatccacgatacggttgaaaacctcatcatccttgcgaacaactctctctcatctaatggaaacgttacagagagtgggtgtaaggagtgcgaagagttggaagaaaaaaacatcaaagaatttcttcaatccttcgttcacatagtgcaaatgttcattaacacgtccactaccacacccgccccgaggccacctacgccggcaccgactatcgccagtcaacccctctctctgcgccccgaggcttgccggcctgcggctggtggggcggtccacacccggggcctggattttgcgtgcgatatatacatctgggcacctcttgccggcacctgcggagtgctgcttctctcactcgttattacgctgtactgc

SEQ ID NO: 2856 - DNA, 2178 bp, synthetic construct
  misc_feature 1..2178: note = Synthetic
  source 1..2178: mol_type = other DNA
atggccttaccagtgaccgccttgctcctgccgctggccttgctgctccacgccgccaggccggacatccagatgacccagtctccatcctcactgtctgcatctgtaggagacagagtcaccatcacttgtcgggcgagtcagggtattagcagctggttagcctggtatcagcagaaaccagagaaagcccctaagtccctgatctatgctgcatccagtttgcaaagtggggtcccatcaaggttcagcggcagtggatctgggacagatttcactctcaccatcagcagcctgcagcctgaagattttgcaacttattactgccaacagtataatagttacccgtacacttttggccaggggaccaagctggagatcaaaggcagcaccagcggcagcggcaagcccggctccggagagggcagcaccaagggccaggtccagctggtacagtctggggctgaggtgaagaagcctggggcctcagtgaaggtctcctgcaaggtttccggatacaccctcactgaattatccatgcactgggtgcgacaggctcctggaaaagggcttgagtggatgggaggttttgatcctgaagatggtgaaacaatctacgcacagaagttccagggcagagtcaccatgaccgaggacacatctacagacacagcctacatggagctgagcagcctgagatctgaggacacggccgtgtattactgtgcaacaggacgtattactatggttcggggagttattatcccctactactactactacatggacgtctggggcaaagggaccacggtcaccgtctcctcagcggccgcaaccacgacgccagcgccgcggccaccaacaccggcgcccaccatcgcgtcgcagcccctgtccctgcgcccagaggcgtgccggccagcggcggggggcgcagtgcacacgagggggctggacttcgcctgtgatatctacatctgggcgcccttggccgggacttgtggggtccttctcctgtcactggttatcaccctttactgcaaacggggcagaaagaaactcctgtatatattcaaacaaccatttatgagaccagtacaaactactcaagaggaagatggctgtagctgccgatttccagaagaagaagaaggaggatgtgaactgagagtgaagttcagcaggagcgcagacgcccccgcgtaccagcagggccagaaccagctctataacgagctcaatctaggacgaagagaggagtacgatgttttggacaagagacgtggccgggaccctgagatggggggaaagccgagaaggaagaaccctcaggaaggcctgtacaatgaactgcagaaagataagatggcggaggcctacagtgagattgggatgaaaggcgagcgccggaggggcaaggggcacgatggcctttaccagggtctcagtacagccaccaaggacacctacgacgcccttcacatgcaggccctgccccctcgcggctctggcgagggaaggggttccctgcttacttgcggcgacgtcgaagagaatcccggtccgatggccctcccagtaactgccctccttttgcccctcgcactccttcttcatgccgctcgccccaactgggtcaacgtgattagcgatttgaagaaaatcgaggaccttatacagtctatgcatattgacgctacactgtatactgagagtgatgtacacccgtcctgtaaggtaacggccatgaaatgctttcttctggagctccaggtcatcagcttggagtctggggacgcaagcatccacgatacggttgaaaacctcatcatccttgcgaacaactctctctcatctaatggaaacgttacagagagtgggtgtaaggagtgcgaagagttggaagaaaaaaacatcaaagaatttcttcaatccttcgttcacatagtgcaaatgttcattaacacgtccactaccacacccgccccgaggccacctacgccggcaccgactatcgccagtcaacccctctctctgcgccccgaggcttgccggcctgcggctggtggggcggtccacacccggggcctggattttgcgtgcgatatatacatctgggcacctcttgccggcacctgcggagtgctgcttctctcactcgttattacgctgtactgc

SEQ ID NO: 2857 - DNA, 2172 bp, synthetic construct
  misc_feature 1..2172: note = Synthetic
  source 1..2172: mol_type = other DNA
atggccttaccagtgaccgccttgctcctgccgctggccttgctgctccacgccgccaggccggatattgtgatgacccagactccactctctctgtccgtcacccctggacagccggcctccatctcctgcaagtctagtaagagcctcctgcatagtgatggaaagacctatttgtattggtacctgcagaagccaggccagcctccacagctcctgatctatgaagtttccaaccggttctctggagtgccagataggttcagtggcagcgggtcagggacagatttcacactgaaaatcagccgggtggaggctgaggatgttggggtttattactgcatgcaaagtatacaatttccgtggacgttcggccaagggaccaaggtggaaatcaagggcagcaccagcggcagcggcaagcccggctccggagagggcagcaccaagggccaggttcagctggtgcagtctggaactgaggtgaagaagcctggggcctcagtgaaggtctcctgcaaggcttctggttacacctttaccaactatggtatcggctgggtgcgacaggcccctggacaagggcttgagtggatgggatggatcatcgcttacaatggttacacaaagtatgcacagattctccagggcagagtcaccatgaccacagacacatccacgaacacagcttatatggaactgaggagcctgagatctgacgacacggccgtgtattactgtgcgagacagcagctcgggggggactaccactactacatggacgtctggggcaaagggaccacggtcaccgtctcctcagcggccgcaaccacgacgccagcgccgcggccaccaacaccggcgcccaccatcgcgtcgcagcccctgtccctgcgcccagaggcgtgccggccagcggcggggggcgcagtgcacacgagggggctggacttcgcctgtgatatctacatctgggcgcccttggccgggacttgtggggtccttctcctgtcactggttatcaccctttactgcaaacggggcagaaagaaactcctgtatatattcaaacaaccatttatgagaccagtacaaactactcaagaggaagatggctgtagctgccgatttccagaagaagaagaaggaggatgtgaactgagagtgaagttcagcaggagcgcagacgcccccgcgtaccagcagggccagaaccagctctataacgagctcaatctaggacgaagagaggagtacgatgttttggacaagagacgtggccgggaccctgagatggggggaaagccgagaaggaagaaccctcaggaaggcctgtacaatgaactgcagaaagataagatggcggaggcctacagtgagattgggatgaaaggcgagcgccggaggggcaaggggcacgatggcctttaccagggtctcagtacagccaccaaggacacctacgacgcccttcacatgcaggccctgccccctcgcggctctggcgagggaaggggttccctgcttacttgcggcgacgtcgaagagaatcccggtccgatggccctcccagtaactgccctccttttgcccctcgcactccttcttcatgccgctcgccccaactgggtcaacgtgattagcgatttgaagaaaatcgaggaccttatacagtctatgcatattgacgctacactgtatactgagagtgatgtacacccgtcctgtaaggtaacggccatgaaatgctttcttctggagctccaggtcatcagcttggagtctggggacgcaagcatccacgatacggttgaaaacctcatcatccttgcgaacaactctctctcatctaatggaaacgttacagagagtgggtgtaaggagtgcgaagagttggaagaaaaaaacatcaaagaatttcttcaatccttcgttcacatagtgcaaatgttcattaacacgtccactaccacacccgccccgaggccacctacgccggcaccgactatcgccagtcaacccctctctctgcgccccgaggcttgccggcctgcggctggtggggcggtccacacccggggcctggattttgcgtgcgatatatacatctgggcacctcttgccggcacctgcggagtgctgcttctctcactcgttattacgctgtactgc

SEQ ID NO: 2858 - DNA, 2172 bp, synthetic construct
  misc_feature 1..2172: note = Synthetic
  source 1..2172: mol_type = other DNA
atggccttaccagtgaccgccttgctcctgccgctggccttgctgctccacgccgccaggccggatattgtgatgacccagactccactctctctgtccgtcacccctggacagccggcctccatctcctgcaagtctagtaagagcctcctgcatagtgatggaaagacctatttgtattggtacctgcagaagccaggccagcctccacagctcctgatctatgaagtttccacccggttctctggagtgccagataggttcagtggcagcgggtcagggacagatttcacactgaaaatcagccgggtggaggctgaggatgttggggtttattactgcatgcaaagtatacagtttccgtggacgttcggccaagggaccaaggtggaaatcaaaggcagcaccagcggcagcggcaagcccggctccggagagggcagcaccaagggccaggttcagctggtgcagtctggaactgaggtgaagaagcctggggcctcagtgaaggtctcctgcaaggcttctggttacacctttaccaactatggtatcggctgggtgcgacaggcccctggacaagggcttgagtggatgggatggatcatcgcttacaatggttacacaaagtatgcacagattctccagggcagagtcaccatgaccacggacacatccacgaacacagcctatatggaactgaggagcctgagatctgacgacacggccgtgtattactgtgcgcgacagcagctcgggggggactaccactactacatggacgtctggggcaaagggaccacggtcaccgtctcttcagcggccgcaaccacgacgccagcgccgcggccaccaacaccggcgcccaccatcgcgtcgcagcccctgtccctgcgcccagaggcgtgccggccagcggcggggggcgcagtgcacacgagggggctggacttcgcctgtgatatctacatctgggcgcccttggccgggacttgtggggtccttctcctgtcactggttatcaccctttactgcaaacggggcagaaagaaactcctgtatatattcaaacaaccatttatgagaccagtacaaactactcaagaggaagatggctgtagctgccgatttccagaagaagaagaaggaggatgtgaactgagagtgaagttcagcaggagcgcagacgcccccgcgtaccagcagggccagaaccagctctataacgagctcaatctaggacgaagagaggagtacgatgttttggacaagagacgtggccgggaccctgagatggggggaaagccgagaaggaagaaccctcaggaaggcctgtacaatgaactgcagaaagataagatggcggaggcctacagtgagattgggatgaaaggcgagcgccggaggggcaaggggcacgatggcctttaccagggtctcagtacagccaccaaggacacctacgacgcccttcacatgcaggccctgccccctcgcggctctggcgagggaaggggttccctgcttacttgcggcgacgtcgaagagaatcccggtccgatggccctcccagtaactgccctccttttgcccctcgcactccttcttcatgccgctcgccccaactgggtcaacgtgattagcgatttgaagaaaatcgaggaccttatacagtctatgcatattgacgctacactgtatactgagagtgatgtacacccgtcctgtaaggtaacggccatgaaatgctttcttctggagctccaggtcatcagcttggagtctggggacgcaagcatccacgatacggttgaaaacctcatcatccttgcgaacaactctctctcatctaatggaaacgttacagagagtgggtgtaaggagtgcgaagagttggaagaaaaaaacatcaaagaatttcttcaatccttcgttcacatagtgcaaatgttcattaacacgtccactaccacacccgccccgaggccacctacgccggcaccgactatcgccagtcaacccctctctctgcgccccgaggcttgccggcctgcggctggtggggcggtccacacccggggcctggattttgcgtgcgatatatacatctgggcacctcttgccggcacctgcggagtgctgcttctctcactcgttattacgctgtactgc

SEQ ID NO: 2859 - DNA, 2166 bp, synthetic construct
  misc_feature 1..2166: note = Synthetic
  source 1..2166: mol_type = other DNA
atggccttaccagtgaccgccttgctcctgccgctggccttgctgctccacgccgccaggccggacatccagatgacccagtctccatcctcactgtctgcctctgtaggagacagagtcaccatcacttgtcgggcgagtcagggtattagcaactggttagcctggtatcagcagaaaccagagaaagcccctaagtccctgatctatgctgcatccagtttgcaaggtggggtcccatcaagattcagcggcagtggatctgggacagatttcactctcaccatcagcagcctgcagcctgaagattttgcaacttattactgccaacagtatgatagttacccgtacacttttggccaggggaccaagctggagatcaaaggcagcaccagcggcagcggcaagcccggctccggagagggcagcaccaagggccaggtgcagctggtgcagtctgggactgaggtgaagaagcctggggcctcagtgaaggtctcctgtaagacttctggatacaccttcaccagttatgatatcaactgggtgcgacaggccactggacaagggcttgagtggatgggatggatgaaccctatcagtggtgacacaggctctgcacagaagttccagggcagagtcaccatgaccaggaacacctccataggcacagcctacatggagctgagcagcctgagatctgaggacacggccgtttattactgtgcgagaggcggatattgtagtagtaccagctgctactactactacatggacgtctggggcaaagggaccacggtcaccgtctcctcagcggccgcaaccacgacgccagcgccgcggccaccaacaccggcgcccaccatcgcgtcgcagcccctgtccctgcgcccagaggcgtgccggccagcggcggggggcgcagtgcacacgagggggctggacttcgcctgtgatatctacatctgggcgcccttggccgggacttgtggggtccttctcctgtcactggttatcaccctttactgcaaacggggcagaaagaaactcctgtatatattcaaacaaccatttatgagaccagtacaaactactcaagaggaagatggctgtagctgccgatttccagaagaagaagaaggaggatgtgaactgagagtgaagttcagcaggagcgcagacgcccccgcgtaccagcagggccagaaccagctctataacgagctcaatctaggacgaagagaggagtacgatgttttggacaagagacgtggccgggaccctgagatggggggaaagccgagaaggaagaaccctcaggaaggcctgtacaatgaactgcagaaagataagatggcggaggcctacagtgagattgggatgaaaggcgagcgccggaggggcaaggggcacgatggcctttaccagggtctcagtacagccaccaaggacacctacgacgcccttcacatgcaggccctgccccctcgcggctctggcgagggaaggggttccctgcttacttgcggcgacgtcgaagagaatcccggtccgatggccctcccagtaactgccctccttttgcccctcgcactccttcttcatgccgctcgccccaactgggtcaacgtgattagcgatttgaagaaaatcgaggaccttatacagtctatgcatattgacgctacactgtatactgagagtgatgtacacccgtcctgtaaggtaacggccatgaaatgctttcttctggagctccaggtcatcagcttggagtctggggacgcaagcatccacgatacggttgaaaacctcatcatccttgcgaacaactctctctcatctaatggaaacgttacagagagtgggtgtaaggagtgcgaagagttggaagaaaaaaacatcaaagaatttcttcaatccttcgttcacatagtgcaaatgttcattaacacgtccactaccacacccgccccgaggccacctacgccggcaccgactatcgccagtcaacccctctctctgcgccccgaggcttgccggcctgcggctggtggggcggtccacacccggggcctggattttgcgtgcgatatatacatctgggcacctcttgccggcacctgcggagtgctgcttctctcactcgttattacgctgtactgc

SEQ ID NO: 2860 - DNA, 2166 bp, synthetic construct
  misc_feature 1..2166: note = Synthetic
  source 1..2166: mol_type = other DNA
atggccttaccagtgaccgccttgctcctgccgctggccttgctgctccacgccgccaggccggacatccagatgacccagtctccatcctcactgtctgcatctgtaggagacagagtcaccatcacttgtcgggcgagtcagggtattagcagctggttagcctggtatcagcagaaaccagagaaagcccctaagtccctgatctatgctgcatccagtttacaaggtggggtcccatcaaggttcagcggcagtggatctgggacagatttcactctcaccatcagcagcctgcagcctgaagattttgcaacttattactgccaacagtatgatagttacccgtacacttttggccaggggaccaagctggagatcaaaggcagcaccagcggcagcggcaagcccggctccggagagggcagcaccaagggccaggtgcagctggtgcagtctggggctgaggtgaagaagcctggggcctcagtgaaggtctcctgcaaggcttctggatacaccttcaccagttatgatatcaactgggtgcgacaggccactggacaagggcttgagtggatgggatggatgatccctaacagtggtgacacaggctctgcacagaagttccagggcagagtcaccatgaccaggaacacctccataagcacagcctacatggagctgagcagcctgagatctgaggacacggccgtttattactgtgcgagaggcggatattgtaatagtaccagttgctactactactacatggacgtctggggcaaagggaccacggtcaccgtctcctcagcggccgcaaccacgacgccagcgccgcggccaccaacaccggcgcccaccatcgcgtcgcagcccctgtccctgcgcccagaggcgtgccggccagcggcggggggcgcagtgcacacgagggggctggacttcgcctgtgatatctacatctgggcgcccttggccgggacttgtggggtccttctcctgtcactggttatcaccctttactgcaaacggggcagaaagaaactcctgtatatattcaaacaaccatttatgagaccagtacaaactactcaagaggaagatggctgtagctgccgatttccagaagaagaagaaggaggatgtgaactgagagtgaagttcagcaggagcgcagacgcccccgcgtaccagcagggccagaaccagctctataacgagctcaatctaggacgaagagaggagtacgatgttttggacaagagacgtggccgggaccctgagatggggggaaagccgagaaggaagaaccctcaggaaggcctgtacaatgaactgcagaaagataagatggcggaggcctacagtgagattgggatgaaaggcgagcgccggaggggcaaggggcacgatggcctttaccagggtctcagtacagccaccaaggacacctacgacgcccttcacatgcaggccctgccccctcgcggctctggcgagggaaggggttccctgcttacttgcggcgacgtcgaagagaatcccggtccgatggccctcccagtaactgccctccttttgcccctcgcactccttcttcatgccgctcgccccaactgggtcaacgtgattagcgatttgaagaaaatcgaggaccttatacagtctatgcatattgacgctacactgtatactgagagtgatgtacacccgtcctgtaaggtaacggccatgaaatgctttcttctggagctccaggtcatcagcttggagtctggggacgcaagcatccacgatacggttgaaaacctcatcatccttgcgaacaactctctctcatctaatggaaacgttacagagagtgggtgtaaggagtgcgaagagttggaagaaaaaaacatcaaagaatttcttcaatccttcgttcacatagtgcaaatgttcattaacacgtccactaccacacccgccccgaggccacctacgccggcaccgactatcgccagtcaacccctctctctgcgccccgaggcttgccggcctgcggctggtggggcggtccacacccggggcctggattttgcgtgcgatatatacatctgggcacctcttgccggcacctgcggagtgctgcttctctcactcgttattacgctgtactgc

SEQ ID NO: 2861 - DNA, 2169 bp, synthetic construct
  misc_feature 1..2169: note = Synthetic
  source 1..2169: mol_type = other DNA
atggccttaccagtgaccgccttgctcctgccgctggccttgctgctccacgccgccaggccggaaattgtgttgacgcagtctccaggcaccctgtctttgtctccaggggaaagagccaccctctcctgcagggccagtcagagtgttagcagcagctacttagcctggtaccagcagaaacctggccaggctcccaggctcctcatctatggtgcatccagcagggccactggcatcccagacaggttcagtgacagtgggtctgggacagacttcactctcaccatcagcagactggagcctgaagattttgcagtgtattactgtcagcactatggtagctcacctccgaggatcactttcggccctgggaccaaagtggatatcaaaggcagcaccagcggcagcggcaagcccggctccggagagggcagcaccaagggcgaggtgcagttgttggagtctgggggaggcttggtacaacctggggggtccctgagactctcctgtgcagcctctggattcacctttagcagctatgtcatgaactgggtccgccaggctccagggaaggggctggaatgggtctcatctgttagtggtagtggtaataactcattctacgcagactccgtgaagggccggttcaccatctccagagacaattccaagaacacgctgtatctgcaaatgaacagcctgagagccgaggacacggccgtatattactgtgcgagtcgtagttccagttatctctactactactactacatggacgtctggggcaaagggaccaccgtcaccgtctcctcagcggccgcaaccacgacgccagcgccgcggccaccaacaccggcgcccaccatcgcgtcgcagcccctgtccctgcgcccagaggcgtgccggccagcggcggggggcgcagtgcacacgagggggctggacttcgcctgtgatatctacatctgggcgcccttggccgggacttgtggggtccttctcctgtcactggttatcaccctttactgcaaacggggcagaaagaaactcctgtatatattcaaacaaccatttatgagaccagtacaaactactcaagaggaagatggctgtagctgccgatttccagaagaagaagaaggaggatgtgaactgagagtgaagttcagcaggagcgcagacgcccccgcgtaccagcagggccagaaccagctctataacgagctcaatctaggacgaagagaggagtacgatgttttggacaagagacgtggccgggaccctgagatggggggaaagccgagaaggaagaaccctcaggaaggcctgtacaatgaactgcagaaagataagatggcggaggcctacagtgagattgggatgaaaggcgagcgccggaggggcaaggggcacgatggcctttaccagggtctcagtacagccaccaaggacacctacgacgcccttcacatgcaggccctgccccctcgcggctctggcgagggaaggggttccctgcttacttgcggcgacgtcgaagagaatcccggtccgatggccctcccagtaactgccctccttttgcccctcgcactccttcttcatgccgctcgccccaactgggtcaacgtgattagcgatttgaagaaaatcgaggaccttatacagtctatgcatattgacgctacactgtatactgagagtgatgtacacccgtcctgtaaggtaacggccatgaaatgctttcttctggagctccaggtcatcagcttggagtctggggacgcaagcatccacgatacggttgaaaacctcatcatccttgcgaacaactctctctcatctaatggaaacgttacagagagtgggtgtaaggagtgcgaagagttggaagaaaaaaacatcaaagaatttcttcaatccttcgttcacatagtgcaaatgttcattaacacgtccactaccacacccgccccgaggccacctacgccggcaccgactatcgccagtcaacccctctctctgcgccccgaggcttgccggcctgcggctggtggggcggtccacacccggggcctggattttgcgtgcgatatatacatctgggcacctcttgccggcacctgcggagtgctgcttctctcactcgttattacgctgtactgc

SEQ ID NO: 2862 - DNA, 2166 bp, synthetic construct
  misc_feature 1..2166: note = Synthetic
  source 1..2166: mol_type = other DNA
atggccttaccagtgaccgccttgctcctgccgctggccttgctgctccacgccgccaggccggagatcgtgctgacccagagccccgacttccagtctgtgacacctaaggaaaaggttacaattacctgtagagcttcccagaccatcggctcttctctgcactggtaccagcagaaacctgatcagtctccaaagctgctgatcaagcacgccagccagagcttctctggcgtccccagccggttttctggcagcggcagcggaacagattttacactgacagtgaactcactggaagccgaggatgccgccacctactactgccatcagagctccagcctcccttggaccttcggccagggcacgaaggtggaaatcaaaggcagcaccagcggcagcggcaagcccggctccggagagggcagcaccaagggccaagtgcagctggtggagagcggcggcggagtggtgcaacctggaagaagcctgcggctgagctgcgctgctagcggcttcaccttcagcagccacgacatgcactgggtgcggcaggcccctggcaagggcctggactgggtcgccgtgatctggagcgacggcaacaagaagtactacgtggacagcgccaagggcagattcaccatcagccgcgacaatagcaagaacaccgtgtacctgcagatgaacagcctgagagccgaggacaccgccatctactattgcgccagaggcgataattggaacgacgagcacagctactattactacatggacgtgtggggcaaaggcacaaccgtgaccgtgtcctccgcggccgcaaccacgacgccagcgccgcggccaccaacaccggcgcccaccatcgcgtcgcagcccctgtccctgcgcccagaggcgtgccggccagcggcggggggcgcagtgcacacgagggggctggacttcgcctgtgatatctacatctgggcgcccttggccgggacttgtggggtccttctcctgtcactggttatcaccctttactgcaaacggggcagaaagaaactcctgtatatattcaaacaaccatttatgagaccagtacaaactactcaagaggaagatggctgtagctgccgatttccagaagaagaagaaggaggatgtgaactgagagtgaagttcagcaggagcgcagacgcccccgcgtaccagcagggccagaaccagctctataacgagctcaatctaggacgaagagaggagtacgatgttttggacaagagacgtggccgggaccctgagatggggggaaagccgagaaggaagaaccctcaggaaggcctgtacaatgaactgcagaaagataagatggcggaggcctacagtgagattgggatgaaaggcgagcgccggaggggcaaggggcacgatggcctttaccagggtctcagtacagccaccaaggacacctacgacgcccttcacatgcaggccctgccccctcgcggctctggcgagggaaggggttccctgcttacttgcggcgacgtcgaagagaatcccggtccgatggccctcccagtaactgccctccttttgcccctcgcactccttcttcatgccgctcgccccaactgggtcaacgtgattagcgatttgaagaaaatcgaggaccttatacagtctatgcatattgacgctacactgtatactgagagtgatgtacacccgtcctgtaaggtaacggccatgaaatgctttcttctggagctccaggtcatcagcttggagtctggggacgcaagcatccacgatacggttgaaaacctcatcatccttgcgaacaactctctctcatctaatggaaacgttacagagagtgggtgtaaggagtgcgaagagttggaagaaaaaaacatcaaagaatttcttcaatccttcgttcacatagtgcaaatgttcattaacacgtccactaccacacccgccccgaggccacctacgccggcaccgactatcgccagtcaacccctctctctgcgccccgaggcttgccggcctgcggctggtggggcggtccacacccggggcctggattttgcgtgcgatatatacatctgggcacctcttgccggcacctgcggagtgctgcttctctcactcgttattacgctgtactgc

SEQ ID NO: 2863 - DNA, 2166 bp, synthetic construct
  misc_feature 1..2166: note = Synthetic
  source 1..2166: mol_type = other DNA
atggccttaccagtgaccgccttgctcctgccgctggccttgctgctccacgccgccaggccggagatcgtgctgacacagtccccagattttcagagcgtgacccccaaggaaaaggtgacaatcacctgcagagccagccagaccatcggcagcagcctgcactggtaccagcagaaacccgatcagtctcctaagctgctgatcaagcacgccagccagagcttcagcggcgttcccagcaggttcagcggaagcggcagcggcaccgacttcaccctgaccgtgaactctctcgaggccgaggacgccgctacatactactgccaccagagcagctccctgccttggaccttcggccagggcaccaaggtcgaaattaagggcagcaccagcggcagcggcaagcccggctccggagagggcagcaccaagggccaagtgcagctggtggaaagcggcggcggagtggtgcaacctggcagatctctgcggctgtcttgtgccgcctctggatttacattcagctctcatgatatgcactgggtgcggcaggcccctggcaaaggcctggactgggtcgccgtgatctggagcgacggcaacaacaagtactacgccgacagcgccaagggaagattcaccatcagccgggacaattctaaaaacaccgtgtacctgcagatgaacagcctgagagctgaggacaccgccatctactattgcgccagaggagataattggaacgacgagcacagctactactactatatggacgtgtggggcaagggcacaacagtgaccgtgtcctccgcggccgcaaccacgacgccagcgccgcggccaccaacaccggcgcccaccatcgcgtcgcagcccctgtccctgcgcccagaggcgtgccggccagcggcggggggcgcagtgcacacgagggggctggacttcgcctgtgatatctacatctgggcgcccttggccgggacttgtggggtccttctcctgtcactggttatcaccctttactgcaaacggggcagaaagaaactcctgtatatattcaaacaaccatttatgagaccagtacaaactactcaagaggaagatggctgtagctgccgatttccagaagaagaagaaggaggatgtgaactgagagtgaagttcagcaggagcgcagacgcccccgcgtaccagcagggccagaaccagctctataacgagctcaatctaggacgaagagaggagtacgatgttttggacaagagacgtggccgggaccctgagatggggggaaagccgagaaggaagaaccctcaggaaggcctgtacaatgaactgcagaaagataagatggcggaggcctacagtgagattgggatgaaaggcgagcgccggaggggcaaggggcacgatggcctttaccagggtctcagtacagccaccaaggacacctacgacgcccttcacatgcaggccctgccccctcgcggctctggcgagggaaggggttccctgcttacttgcggcgacgtcgaagagaatcccggtccgatggccctcccagtaactgccctccttttgcccctcgcactccttcttcatgccgctcgccccaactgggtcaacgtgattagcgatttgaagaaaatcgaggaccttatacagtctatgcatattgacgctacactgtatactgagagtgatgtacacccgtcctgtaaggtaacggccatgaaatgctttcttctggagctccaggtcatcagcttggagtctggggacgcaagcatccacgatacggttgaaaacctcatcatccttgcgaacaactctctctcatctaatggaaacgttacagagagtgggtgtaaggagtgcgaagagttggaagaaaaaaacatcaaagaatttcttcaatccttcgttcacatagtgcaaatgttcattaacacgtccactaccacacccgccccgaggccacctacgccggcaccgactatcgccagtcaacccctctctctgcgccccgaggcttgccggcctgcggctggtggggcggtccacacccggggcctggattttgcgtgcgatatatacatctgggcacctcttgccggcacctgcggagtgctgcttctctcactcgttattacgctgtactgc

SEQ ID NO: 2864 - DNA, 2163 bp, synthetic construct
  misc_feature 1..2163: note = Synthetic
  source 1..2163: mol_type = other DNA
atggccttaccagtgaccgccttgctcctgccgctggccttgctgctccacgccgccaggccggatatccagatgacccagagccccagcagcctgagcgccagcgtgggcgaccgggtcacaatcacctgcagagccagccagagcatcagcaattacctgaactggtaccaccagaagcccggcaaagcccctaagctgctgatctacgctgcttctagcctcgagagcggcgtgcctagcagattcagcggcagcggcagcggaacagatttcaccctgacaatcagctctctgcaacctgaggacttcgccacatactattgtcagcagtcctacagcaatcctctgaccttcggcggcggcacaaaggtggaatctaagggcagcaccagcggcagcggcaagcccggctccggagagggcagcaccaagggccaactgcagctggtgcagagcggagccgaggtgaagaagcctggcgctagcgttaaggtgtcctgcaaggcctccggctacacctttaccaactacggcatctcctggctgcgccaggccccaggccagggcctggagtggatgggctggatctccggatacaacgacaacacccactacgcccagaaattccagggtagagtgactatgaccaccgataccagcacaacaacagcctacatggaactgagaaacctgcggagcgacgacaccgccgtgtactactgcgcccgggacggcattgccgctagacctgtgtactactattacatggacgtgtggggcaagggcaccaccgtgacagtgtcttctgcggccgcaaccacgacgccagcgccgcggccaccaacaccggcgcccaccatcgcgtcgcagcccctgtccctgcgcccagaggcgtgccggccagcggcggggggcgcagtgcacacgagggggctggacttcgcctgtgatatctacatctgggcgcccttggccgggacttgtggggtccttctcctgtcactggttatcaccctttactgcaaacggggcagaaagaaactcctgtatatattcaaacaaccatttatgagaccagtacaaactactcaagaggaagatggctgtagctgccgatttccagaagaagaagaaggaggatgtgaactgagagtgaagttcagcaggagcgcagacgcccccgcgtaccagcagggccagaaccagctctataacgagctcaatctaggacgaagagaggagtacgatgttttggacaagagacgtggccgggaccctgagatggggggaaagccgagaaggaagaaccctcaggaaggcctgtacaatgaactgcagaaagataagatggcggaggcctacagtgagattgggatgaaaggcgagcgccggaggggcaaggggcacgatggcctttaccagggtctcagtacagccaccaaggacacctacgacgcccttcacatgcaggccctgccccctcgcggctctggcgagggaaggggttccctgcttacttgcggcgacgtcgaagagaatcccggtccgatggccctcccagtaactgccctccttttgcccctcgcactccttcttcatgccgctcgccccaactgggtcaacgtgattagcgatttgaagaaaatcgaggaccttatacagtctatgcatattgacgctacactgtatactgagagtgatgtacacccgtcctgtaaggtaacggccatgaaatgctttcttctggagctccaggtcatcagcttggagtctggggacgcaagcatccacgatacggttgaaaacctcatcatccttgcgaacaactctctctcatctaatggaaacgttacagagagtgggtgtaaggagtgcgaagagttggaagaaaaaaacatcaaagaatttcttcaatccttcgttcacatagtgcaaatgttcattaacacgtccactaccacacccgccccgaggccacctacgccggcaccgactatcgccagtcaacccctctctctgcgccccgaggcttgccggcctgcggctggtggggcggtccacacccggggcctggattttgcgtgcgatatatacatctgggcacctcttgccggcacctgcggagtgctgcttctctcactcgttattacgctgtactgc

SEQ ID NO: 2865 - DNA, 2160 bp, synthetic construct
  misc_feature 1..2160: note = Synthetic
  source 1..2160: mol_type = other DNA
atggccttaccagtgaccgccttgctcctgccgctggccttgctgctccacgccgccaggccggagattgttctgacccagagccctgatttccagagcgtgacccccaaggaaaaggtgacaatcacctgccgggccagccaaagcatcggctccagcctgcactggtatcagcagaagcccgaccagtccccaaagctgctgatcaaattcgcctctcagtcattcagcggcgtgccttcccggttcagcggaagcggcagcggcacagactttaccctgacaatccacagcctggaagccgaggacgccgctacatactactgccaccagagcggcagcctgccctggacattcggccagggcacgaaggtggagatcaagggcagcaccagcggcagcggcaagcccggctccggagagggcagcaccaagggccaagtgcagctggtggagagcgggggaggtgtcgtgcagcctggaagaagcctcagactgtcttgtgtggccagcggctttaccttcagctctaatgacatctactgggtgcggcaggcccctggcaagggcctggaatgggtcgctgtgatctggtacgacggcagcaacaaatactacgccgattctgtgaagggcagattcaccatcagcagagataattctaagaacaccctgtacctgcagatgaacagcctgagagccgaggataccgccgtgtactattgcgccaggggcgacaactggaacgacgagcaccattaccactactacatggacgtgtggggcaaaggcaccaccgtgaccgtggcggccgcaaccacgacgccagcgccgcggccaccaacaccggcgcccaccatcgcgtcgcagcccctgtccctgcgcccagaggcgtgccggccagcggcggggggcgcagtgcacacgagggggctggacttcgcctgtgatatctacatctgggcgcccttggccgggacttgtggggtccttctcctgtcactggttatcaccctttactgcaaacggggcagaaagaaactcctgtatatattcaaacaaccatttatgagaccagtacaaactactcaagaggaagatggctgtagctgccgatttccagaagaagaagaaggaggatgtgaactgagagtgaagttcagcaggagcgcagacgcccccgcgtaccagcagggccagaaccagctctataacgagctcaatctaggacgaagagaggagtacgatgttttggacaagagacgtggccgggaccctgagatggggggaaagccgagaaggaagaaccctcaggaaggcctgtacaatgaactgcagaaagataagatggcggaggcctacagtgagattgggatgaaaggcgagcgccggaggggcaaggggcacgatggcctttaccagggtctcagtacagccaccaaggacacctacgacgcccttcacatgcaggccctgccccctcgcggctctggcgagggaaggggttccctgcttacttgcggcgacgtcgaagagaatcccggtccgatggccctcccagtaactgccctccttttgcccctcgcactccttcttcatgccgctcgccccaactgggtcaacgtgattagcgatttgaagaaaatcgaggaccttatacagtctatgcatattgacgctacactgtatactgagagtgatgtacacccgtcctgtaaggtaacggccatgaaatgctttcttctggagctccaggtcatcagcttggagtctggggacgcaagcatccacgatacggttgaaaacctcatcatccttgcgaacaactctctctcatctaatggaaacgttacagagagtgggtgtaaggagtgcgaagagttggaagaaaaaaacatcaaagaatttcttcaatccttcgttcacatagtgcaaatgttcattaacacgtccactaccacacccgccccgaggccacctacgccggcaccgactatcgccagtcaacccctctctctgcgccccgaggcttgccggcctgcggctggtggggcggtccacacccggggcctggattttgcgtgcgatatatacatctgggcacctcttgccggcacctgcggagtgctgcttctctcactcgttattacgctgtactgc

SEQ ID NO: 2866 - DNA, 2154 bp, synthetic construct
  misc_feature 1..2154: note = Synthetic
  source 1..2154: mol_type = other DNA
atggccttaccagtgaccgccttgctcctgccgctggccttgctgctccacgccgccaggccgcaagtgcagctggtggaaagcggcggcggtgttgtgcaacctggcagaagcctgcggctgtcatgcgccgccagcggcttcaccttcagctcttacggcatgcactgggtgcggcaggcccctggaaagggactggaatgggtcgccgtgatcagctacgacggctccaacaagtactacgccgacagcgtgaaaggcagattcaccatctctagggacaacagcaagaccaccctctacctgcagatgaacagcctgagagccgaggacaccgccgtgtactattgtgccagagatcactactactactacatggacgtgtggggcaagggcaccaccgtgaccgtgtcttctggcagcaccagcggcagcggcaagcccggctccggagagggcagcaccaagggccagaccgtggtgactcaggagcccagcttcagcgtcagccccggcggaacagtgaccctgacatgcggcctgagcagcggcagcgtgtccaccagctactatcctagctggtaccagcagacaccaggccaggctcctagaaccctgatctacagcaccaacatccggagcagcggcgtgcctgatagatttagcggctctatcctgggaaataaagccgctctgaccattacaggcgcccaggctgatgacgagagcgactactactgcgtgctgtacatgggctctgatatcgtggttttcggcggcggcacaaagctgacagtgctggcggccgcaaccacgacgccagcgccgcggccaccaacaccggcgcccaccatcgcgtcgcagcccctgtccctgcgcccagaggcgtgccggccagcggcggggggcgcagtgcacacgagggggctggacttcgcctgtgatatctacatctgggcgcccttggccgggacttgtggggtccttctcctgtcactggttatcaccctttactgcaaacggggcagaaagaaactcctgtatatattcaaacaaccatttatgagaccagtacaaactactcaagaggaagatggctgtagctgccgatttccagaagaagaagaaggaggatgtgaactgagagtgaagttcagcaggagcgcagacgcccccgcgtaccagcagggccagaaccagctctataacgagctcaatctaggacgaagagaggagtacgatgttttggacaagagacgtggccgggaccctgagatggggggaaagccgagaaggaagaaccctcaggaaggcctgtacaatgaactgcagaaagataagatggcggaggcctacagtgagattgggatgaaaggcgagcgccggaggggcaaggggcacgatggcctttaccagggtctcagtacagccaccaaggacacctacgacgcccttcacatgcaggccctgccccctcgcggctctggcgagggaaggggttccctgcttacttgcggcgacgtcgaagagaatcccggtccgatggccctcccagtaactgccctccttttgcccctcgcactccttcttcatgccgctcgccccaactgggtcaacgtgattagcgatttgaagaaaatcgaggaccttatacagtctatgcatattgacgctacactgtatactgagagtgatgtacacccgtcctgtaaggtaacggccatgaaatgctttcttctggagctccaggtcatcagcttggagtctggggacgcaagcatccacgatacggttgaaaacctcatcatccttgcgaacaactctctctcatctaatggaaacgttacagagagtgggtgtaaggagtgcgaagagttggaagaaaaaaacatcaaagaatttcttcaatccttcgttcacatagtgcaaatgttcattaacacgtccactaccacacccgccccgaggccacctacgccggcaccgactatcgccagtcaacccctctctctgcgccccgaggcttgccggcctgcggctggtggggcggtccacacccggggcctggattttgcgtgcgatatatacatctgggcacctcttgccggcacctgcggagtgctgcttctctcactcgttattacgctgtactgc

SEQ ID NO: 2867 - DNA, 2160 bp, synthetic construct
  misc_feature 1..2160: note = Synthetic
  source 1..2160: mol_type = other DNA
atggccttaccagtgaccgccttgctcctgccgctggccttgctgctccacgccgccaggccggagatcgtgctgacacagtcccctgctaccctgagcctgagccctggcgagcgggccaccctgagctgcagagccagccagagcgtgtccagctactttgcctggtatcagcagaagcctggccaggccccacggctgctgatctacgacgcctctaatagagccacaggcatcccagctagattcagcggctccggctccggaaccgatttcaccctgaccatctctagcctcgagcctgaggacttcgccgtttactattgtcagcaaagaagcaactggcctctgacatttggcggaggcacaaaggtggaaatcaagggcagcaccagcggcagcggcaagcccggctccggagagggcagcaccaagggccaactgcagctgcaggagagcggccctggactggtgaagcccagcgagacactgagcctgacatgcaccgtgtccggaggctctatcagcagcagcagctactactggggatggattagacagccccccggcaagggcctggaatggatcggcagcctgtactacagcggcagcacctactacaaccccagcctgaagtctagagtgaccatcagcgtggacaccagcaagaaccagttcagcctgaaactgagctctgtcacagccgccgataccgccgtgtactactgcgccgctgtgcagctggaaaggcggggctacttctacatggacgtgtggggcaaaggcaccaccgtgacagtgtctagcgcggccgcaaccacgacgccagcgccgcggccaccaacaccggcgcccaccatcgcgtcgcagcccctgtccctgcgcccagaggcgtgccggccagcggcggggggcgcagtgcacacgagggggctggacttcgcctgtgatatctacatctgggcgcccttggccgggacttgtggggtccttctcctgtcactggttatcaccctttactgcaaacggggcagaaagaaactcctgtatatattcaaacaaccatttatgagaccagtacaaactactcaagaggaagatggctgtagctgccgatttccagaagaagaagaaggaggatgtgaactgagagtgaagttcagcaggagcgcagacgcccccgcgtaccagcagggccagaaccagctctataacgagctcaatctaggacgaagagaggagtacgatgttttggacaagagacgtggccgggaccctgagatggggggaaagccgagaaggaagaaccctcaggaaggcctgtacaatgaactgcagaaagataagatggcggaggcctacagtgagattgggatgaaaggcgagcgccggaggggcaaggggcacgatggcctttaccagggtctcagtacagccaccaaggacacctacgacgcccttcacatgcaggccctgccccctcgcggctctggcgagggaaggggttccctgcttacttgcggcgacgtcgaagagaatcccggtccgatggccctcccagtaactgccctccttttgcccctcgcactccttcttcatgccgctcgccccaactgggtcaacgtgattagcgatttgaagaaaatcgaggaccttatacagtctatgcatattgacgctacactgtatactgagagtgatgtacacccgtcctgtaaggtaacggccatgaaatgctttcttctggagctccaggtcatcagcttggagtctggggacgcaagcatccacgatacggttgaaaacctcatcatccttgcgaacaactctctctcatctaatggaaacgttacagagagtgggtgtaaggagtgcgaagagttggaagaaaaaaacatcaaagaatttcttcaatccttcgttcacatagtgcaaatgttcattaacacgtccactaccacacccgccccgaggccacctacgccggcaccgactatcgccagtcaacccctctctctgcgccccgaggcttgccggcctgcggctggtggggcggtccacacccggggcctggattttgcgtgcgatatatacatctgggcacctcttgccggcacctgcggagtgctgcttctctcactcgttattacgctgtactgc

SEQ ID NO: 2868 - DNA, 2166 bp, synthetic construct
  misc_feature 1..2166: note = Synthetic
  source 1..2166: mol_type = other DNA
atggccttaccagtgaccgccttgctcctgccgctggccttgctgctccacgccgccaggccgcagaccgtcgtgacccaggagcctagcttcagcgtgtccccaggcggaaccgtcacactgacatgcggcctcacaagcggcagcgtgtccaccagctactaccccaactggtaccagcagacacctggacaggcccctagaaccctgatctacagcaccaacatccggagcagcggagtgcccgacagattttctggcagcatcctgggcaacaaggccgctctgaccatcaccggcgctcaggccgacgacgagagcgactactactgcgtgctgtacatgggcagcggcatgttcatcttcggcagcggcacaaaggtgacagtgctgggcagcaccagcggcagcggcaagcccggctccggagagggcagcaccaagggccaagtgcaactggtggaaagcggcggcggcgttgtgcagcctggcagaagcctgcggctgtcatgcgccgccagcggttttaccttctctaattacggcatgcactgggtgcggcaggctcccggcaaaggcctggaatggatggccgtgatctggtccgatggccacaacaagtactacgccgatagcgtgaaaggcagattcaccattagcagagataattctaagaacaccctgtacctgcagatgaacagcctgcgcgccgaggacaccgccgtgtactattgtgccagagcccagctggagcggagatacttctactatatggacgtgtggggcaagggcaccaccgtgacagtgtctagcgcggccgcaaccacgacgccagcgccgcggccaccaacaccggcgcccaccatcgcgtcgcagcccctgtccctgcgcccagaggcgtgccggccagcggcggggggcgcagtgcacacgagggggctggacttcgcctgtgatatctacatctgggcgcccttggccgggacttgtggggtccttctcctgtcactggttatcaccctttactgcaaacggggcagaaagaaactcctgtatatattcaaacaaccatttatgagaccagtacaaactactcaagaggaagatggctgtagctgccgatttccagaagaagaagaaggaggatgtgaactgagagtgaagttcagcaggagcgcagacgcccccgcgtaccagcagggccagaaccagctctataacgagctcaatctaggacgaagagaggagtacgatgttttggacaagagacgtggccgggaccctgagatggggggaaagccgagaaggaagaaccctcaggaaggcctgtacaatgaactgcagaaagataagatggcggaggcctacagtgagattgggatgaaaggcgagcgccggaggggcaaggggcacgatggcctttaccagggtctcagtacagccaccaaggacacctacgacgcccttcacatgcaggccctgccccctcgcggctctggcgagggaaggggttccctgcttacttgcggcgacgtcgaagagaatcccggtccgatggccctcccagtaactgccctccttttgcccctcgcactccttcttcatgccgctcgccccaactgggtcaacgtgattagcgatttgaagaaaatcgaggaccttatacagtctatgcatattgacgctacactgtatactgagagtgatgtacacccgtcctgtaaggtaacggccatgaaatgctttcttctggagctccaggtcatcagcttggagtctggggacgcaagcatccacgatacggttgaaaacctcatcatccttgcgaacaactctctctcatctaatggaaacgttacagagagtgggtgtaaggagtgcgaagagttggaagaaaaaaacatcaaagaatttcttcaatccttcgttcacatagtgcaaatgttcattaacacgtccactaccacacccgccccgaggccacctacgccggcaccgactatcgccagtcaacccctctctctgcgccccgaggcttgccggcctgcggctggtggggcggtccacacccggggcctggattttgcgtgcgatatatacatctgggcacctcttgccggcacctgcggagtgctgcttctctcactcgttattacgctgtactgc

SEQ ID NO: 2869 - DNA, 2166 bp, synthetic construct
  misc_feature 1..2166: note = Synthetic
  source 1..2166: mol_type = other DNA
atggccttaccagtgaccgccttgctcctgccgctggccttgctgctccacgccgccaggccggacatccagatgacacagagccctagcagcctgtctgcttccgtgggcgatagagtgacaatcacctgccgggcctcccagggcatcagctcctggctggcctggtaccagcagaagcctgagaaggcccctaagagcctgatctacgccgcttctagcctgcagggaggcgtgccaagtcggttcagcggcagcggcagcggcacagacttcaccctgaccatttcttctctgcaacctgaggacttcgccacctactactgtcagcaatacgacagctacccctacacctttggccagggcaccaagctggaaatcaagtggcagcaccagcggcagcggcaagcccggctccggagagggcagcaccaagggccaggttcagctggtgcagagcggagccgaggtgaaaaagcccggcgcaagcgtgaaggtgtcttgcaaggcctccggatataccttcaccagctacgatatcaactgggtgcggcaggccacaggccagggtctcgaatggatgggctggatgatccccaattctggcgacacaggcagcgcccaaaagttccagggcagagtgacaatgaccagaaacaccagcatcggaacagcctacatggaactgagctccctgagaagcgaggataccgccgtgtactattgtgccagaggcggctactgcaacagcacctcctgctactactactacatggacgtgtggggcaaaggcacaaccgtcaccgtgagctcgcggccgcaaccacgacgccagcgccgcggccaccaacaccggcgcccaccatcgcgtcgcagcccctgtccctgcgcccagaggcgtgccggccagcggcggggggcgcagtgcacacgagggggctggacttcgcctgtgatatctacatctgggcgcccttggccgggacttgtggggtccttctcctgtcactggttatcaccctttactgcaaacggggcagaaagaaactcctgtatatattcaaacaaccatttatgagaccagtacaaactactcaagaggaagatggctgtagctgccgatttccagaagaagaagaaggaggatgtgaactgagagtgaagttcagcaggagcgcagacgcccccgcgtaccagcagggccagaaccagctctataacgagctcaatctaggacgaagagaggagtacgatgttttggacaagagacgtggccgggaccctgagatggggggaaagccgagaaggaagaaccctcaggaaggcctgtacaatgaactgcagaaagataagatggcggaggcctacagtgagattgggatgaaaggcgagcgccggaggggcaaggggcacgatggcctttaccagggtctcagtacagccaccaaggacacctacgacgcccttcacatgcaggccctgccccctcgcggctctggcgagggaaggggttccctgcttacttgcggcgacgtcgaagagaatcccggtccgatggccctcccagtaactgccctccttttgcccctcgcactccttcttcatgccgctcgccccaactgggtcaacgtgattagcgatttgaagaaaatcgaggaccttatacagtctatgcatattgacgctacactgtatactgagagtgatgtacacccgtcctgtaaggtaacggccatgaaatgctttcttctggagctccaggtcatcagcttggagtctggggacgcaagcatccacgatacggttgaaaacctcatcatccttgcgaacaactctctctcatctaatggaaacgttacagagagtgggtgtaaggagtgcgaagagttggaagaaaaaaacatcaaagaatttcttcaatccttcgttcacatagtgcaaatgttcattaacacgtccactaccacacccgccccgaggccacctacgccggcaccgactatcgccagtcaacccctctctctgcgccccgaggcttgccggcctgcggctggtggggcggtccacacccggggcctggattttgcgtgcgatatatacatctgggcacctcttgccggcacctgcggagtgctgcttctctcactcgttattacgctgtactgc

SEQ ID NO: 2870 - DNA, 2169 bp, synthetic construct
  misc_feature 1..2169: note = Synthetic
  source 1..2169: mol_type = other DNA
atggccttaccagtgaccgccttgctcctgccgctggccttgctgctccacgccgccaggccggatatccaggtcacacagagccctacctttctgagcgcttctgtgggcgaccgggtgaccatcacatgccgggccagccagggtattagcagctacctggcttggtaccagcagaagcccggcaaagcccctaagctgctgatctacggcgcttctaccctgcagtccggcgtgcccagcagattcagcggcagcggaagcggaacagagttcaccctgacaatctccagcctccaacctgaggacttcgccacatactattgtcagcaactgaatagctatccttggacattcggccagggcaccaaggtggaaatcaagggcagcaccagcggcagcggcaagcccggctccggagagggcagcaccaagggccaggttcaactggtgcagagcggcgccgaggtgaagaagcctggcgccagcgtgaaagtgtcctgcaaggccagcggatacacgtttaccagctacgacatcaactgggtcagacaggccaccggccagggcctggaatggatgggatggatgaaccccaacagcggcaacaccgtgtacgcccagaaattccagggcagagtgaccatgacacggaacaccagcatcagcaccgcctacatggaactgagctctctgagatccgaggatacagccgtgtactactgcgccagaggcggagatttctggagcggctaccacgactactactactacatggacgtgtggggcaagggcaccaccgtgaccgtgtcttctgcggccgcaaccacgacgccagcgccgcggccaccaacaccggcgcccaccatcgcgtcgcagcccctgtccctgcgcccagaggcgtgccggccagcggcggggggcgcagtgcacacgagggggctggacttcgcctgtgatatctacatctgggcgcccttggccgggacttgtggggtccttctcctgtcactggttatcaccctttactgcaaacggggcagaaagaaactcctgtatatattcaaacaaccatttatgagaccagtacaaactactcaagaggaagatggctgtagctgccgatttccagaagaagaagaaggaggatgtgaactgagagtgaagttcagcaggagcgcagacgcccccgcgtaccagcagggccagaaccagctctataacgagctcaatctaggacgaagagaggagtacgatgttttggacaagagacgtggccgggaccctgagatggggggaaagccgagaaggaagaaccctcaggaaggcctgtacaatgaactgcagaaagataagatggcggaggcctacagtgagattgggatgaaaggcgagcgccggaggggcaaggggcacgatggcctttaccagggtctcagtacagccaccaaggacacctacgacgcccttcacatgcaggccctgccccctcgcggctctggcgagggaaggggttccctgcttacttgcggcgacgtcgaagagaatcccggtccgatggccctcccagtaactgccctccttttgcccctcgcactccttcttcatgccgctcgccccaactgggtcaacgtgattagcgatttgaagaaaatcgaggaccttatacagtctatgcatattgacgctacactgtatactgagagtgatgtacacccgtcctgtaaggtaacggccatgaaatgctttcttctggagctccaggtcatcagcttggagtctggggacgcaagcatccacgatacggttgaaaacctcatcatccttgcgaacaactctctctcatctaatggaaacgttacagagagtgggtgtaaggagtgcgaagagttggaagaaaaaaacatcaaagaatttcttcaatccttcgttcacatagtgcaaatgttcattaacacgtccactaccacacccgccccgaggccacctacgccggcaccgactatcgccagtcaacccctctctctgcgccccgaggcttgccggcctgcggctggtggggcggtccacacccggggcctggattttgcgtgcgatatatacatctgggcacctcttgccggcacctgcggagtgctgcttctctcactcgttattacgctgtactgc

SEQ ID NO: 2871 - DNA, 2163 bp, synthetic construct
  misc_feature 1..2163: note = Synthetic
  source 1..2163: mol_type = other DNA
atggccttaccagtgaccgccttgctcctgccgctggccttgctgctccacgccgccaggccgagctacgagctgacccagcctccatctgtctccgtgtctccaggccaaacagccagcatcacctgcagcggagataagctgggcgacaagtacgcctgctggtaccagcagaagcccggccagagccctgtgctggtgatctaccaggacagcaagcggcctagcggcatccccgagagattcagcggctccaacagcggcaataccgctacactgacaatcagcggcacacaggccatggatgaggccgactactactgccaggcctgggacagctctaccgccgtgttcggcggcggaacccagctcaccgccctgggcagcaccagcggcagcggcaagcccggctccggagagggcagcaccaagggccaagtgcagctgcaggagagcggtcctggcctggttaagcctagcgagacactgtctctgacttgcaccgtgtccggcggatctatcagcagctactactggtcctggatcagacagcccgccggcaaaggcctggaatggattggaagaatctacaccagcggcagcaccaactacaaccccagcctgaagtccagagtgacaatgagcgtggacacatctaagaaccagtttagcctgaaactgagcagcgtgaccgccgccgatacagctgtgtactattgtgcccgggaagaataccagctgctgcctgccctgtactactattactacatggacgtgtggggcaagggcaccaccgtgaccgtgtccagcgcggccgcaaccacgacgccagcgccgcggccaccaacaccggcgcccaccatcgcgtcgcagcccctgtccctgcgcccagaggcgtgccggccagcggcggggggcgcagtgcacacgagggggctggacttcgcctgtgatatctacatctgggcgcccttggccgggacttgtggggtccttctcctgtcactggttatcaccctttactgcaaacggggcagaaagaaactcctgtatatattcaaacaaccatttatgagaccagtacaaactactcaagaggaagatggctgtagctgccgatttccagaagaagaagaaggaggatgtgaactgagagtgaagttcagcaggagcgcagacgcccccgcgtaccagcagggccagaaccagctctataacgagctcaatctaggacgaagagaggagtacgatgttttggacaagagacgtggccgggaccctgagatggggggaaagccgagaaggaagaaccctcaggaaggcctgtacaatgaactgcagaaagataagatggcggaggcctacagtgagattgggatgaaaggcgagcgccggaggggcaaggggcacgatggcctttaccagggtctcagtacagccaccaaggacacctacgacgcccttcacatgcaggccctgccccctcgcggctctggcgagggaaggggttccctgcttacttgcggcgacgtcgaagagaatcccggtccgatggccctcccagtaactgccctccttttgcccctcgcactccttcttcatgccgctcgccccaactgggtcaacgtgattagcgatttgaagaaaatcgaggaccttatacagtctatgcatattgacgctacactgtatactgagagtgatgtacacccgtcctgtaaggtaacggccatgaaatgctttcttctggagctccaggtcatcagcttggagtctggggacgcaagcatccacgatacggttgaaaacctcatcatccttgcgaacaactctctctcatctaatggaaacgttacagagagtgggtgtaaggagtgcgaagagttggaagaaaaaaacatcaaagaatttcttcaatccttcgttcacatagtgcaaatgttcattaacacgtccactaccacacccgccccgaggccacctacgccggcaccgactatcgccagtcaacccctctctctgcgccccgaggcttgccggcctgcggctggtggggcggtccacacccggggcctggattttgcgtgcgatatatacatctgggcacctcttgccggcacctgcggagtgctgcttctctcactcgttattacgctgtactgc

SEQ ID NO: 2872 - DNA, 2166 bp, synthetic construct
  misc_feature 1..2166: note = Synthetic
  source 1..2166: mol_type = other DNA
atggccttaccagtgaccgccttgctcctgccgctggccttgctgctccacgccgccaggccgcagaccgtggtcacccaggagcctagctttagcgtgtccccaggaggtacagtgaccctgacatgcggcctgactagcggatctgtgtccaccagctactaccccaactggtaccagcagacacctggccaggcccctagaaccctgatctacagcaccaatatccggagctccggcgtgcccgacagattcagcggaagcatcctgggcaacaaggccgctctgaccatcaccggcgcccaagctgatgacgagagcgactactattgtgtgctgtacatgggcagcggcatgttcatcttcggctctggcaccaaggtgaccgtgctgggcagcaccagcggcagcggcaagcccggctccggagagggcagcaccaagggccaagtgcagctggtggaatctggcggcggcgtggtgcagcctggtaggagcctgcggctgtcatgcgccgccacaggcttcaccttcagcagctacggcatgcactgggtcagacaggcccctggcaagggactggagtggatggtggtgatctggtccgatggccacaataaatactacgccgacagcgtgaagggcagatttaccattagccgggacaacagcaagaacaccctgtacctgcagatgaacagcctgagagctgaagataccgccgtgtactactgcgccagagcccagctcgagcggagatacttctactatatggacgtgtggggcaaaggcacaacagtgaccgtttcttctgcggccgcaaccacgacgccagcgccgcggccaccaacaccggcgcccaccatcgcgtcgcagcccctgtccctgcgcccagaggcgtgccggccagcggcggggggcgcagtgcacacgagggggctggacttcgcctgtgatatctacatctgggcgcccttggccgggacttgtggggtccttctcctgtcactggttatcaccctttactgcaaacggggcagaaagaaactcctgtatatattcaaacaaccatttatgagaccagtacaaactactcaagaggaagatggctgtagctgccgatttccagaagaagaagaaggaggatgtgaactgagagtgaagttcagcaggagcgcagacgcccccgcgtaccagcagggccagaaccagctctataacgagctcaatctaggacgaagagaggagtacgatgttttggacaagagacgtggccgggaccctgagatggggggaaagccgagaaggaagaaccctcaggaaggcctgtacaatgaactgcagaaagataagatggcggaggcctacagtgagattgggatgaaaggcgagcgccggaggggcaaggggcacgatggcctttaccagggtctcagtacagccaccaaggacacctacgacgcccttcacatgcaggccctgccccctcgcggctctggcgagggaaggggttccctgcttacttgcggcgacgtcgaagagaatcccggtccgatggccctcccagtaactgccctccttttgcccctcgcactccttcttcatgccgctcgccccaactgggtcaacgtgattagcgatttgaagaaaatcgaggaccttatacagtctatgcatattgacgctacactgtatactgagagtgatgtacacccgtcctgtaaggtaacggccatgaaatgctttcttctggagctccaggtcatcagcttggagtctggggacgcaagcatccacgatacggttgaaaacctcatcatccttgcgaacaactctctctcatctaatggaaacgttacagagagtgggtgtaaggagtgcgaagagttggaagaaaaaaacatcaaagaatttcttcaatccttcgttcacatagtgcaaatgttcattaacacgtccactaccacacccgccccgaggccacctacgccggcaccgactatcgccagtcaacccctctctctgcgccccgaggcttgccggcctgcggctggtggggcggtccacacccggggcctggattttgcgtgcgatatatacatctgggcacctcttgccggcacctgcggagtgctgcttctctcactcgttattacgctgtactgc

SEQ ID NO: 2873 - DNA, 2166 bp, synthetic construct
  misc_feature 1..2166: note = Synthetic
  source 1..2166: mol_type = other DNA
atggccttaccagtgaccgccttgctcctgccgctggccttgctgctccacgccgccaggccggagatcgtgctgacccagtctccagatttccagtccgtgacccctaaggaaaaggtgaccatcacatgcagagccagccagtccatcggctctagcctgcactggtaccagcagaagcccgaccagtctcctatgctgctgatcaaattcgcctctcagagcatcagcggcgtgcccagccggttcagcggcagcggctccggcaccgacttcacactgacaatcaacagtctggaggccgaggatgccgctgcttactactgtcaccagagcagcagcctgccttggacatttggccagggcaccaaggtggaaattaagggcagcaccagcggcagcggcaagcccggctccggagagggcagcaccaagggccaagtgcagctggtcgagagcggaggcggcgttgtgcaacctggaaggagcctgcggctgagctgcgccgcttctggcttcacctttactagctacgacatgcactgggtgcggcaggcccctggcaagggcctggaatgggtcaccatcatctggttcgacggcagcaacaagtactacgccgatagcgtgaagggcagattcaccatcagcagagataatagcaagaataccctgtacctgcagatgaactctctctccgccgaggacaccgccgtgtactactgcgccagaggcgacaactggaacgacagatactattattactactacatggacgtgtggggcaaaggcaccaccgtgacagtgtccagcgcggccgcaaccacgacgccagcgccgcggccaccaacaccggcgcccaccatcgcgtcgcagcccctgtccctgcgcccagaggcgtgccggccagcggcggggggcgcagtgcacacgagggggctggacttcgcctgtgatatctacatctgggcgcccttggccgggacttgtggggtccttctcctgtcactggttatcaccctttactgcaaacggggcagaaagaaactcctgtatatattcaaacaaccatttatgagaccagtacaaactactcaagaggaagatggctgtagctgccgatttccagaagaagaagaaggaggatgtgaactgagagtgaagttcagcaggagcgcagacgcccccgcgtaccagcagggccagaaccagctctataacgagctcaatctaggacgaagagaggagtacgatgttttggacaagagacgtggccgggaccctgagatggggggaaagccgagaaggaagaaccctcaggaaggcctgtacaatgaactgcagaaagataagatggcggaggcctacagtgagattgggatgaaaggcgagcgccggaggggcaaggggcacgatggcctttaccagggtctcagtacagccaccaaggacacctacgacgcccttcacatgcaggccctgccccctcgcggctctggcgagggaaggggttccctgcttacttgcggcgacgtcgaagagaatcccggtccgatggccctcccagtaactgccctccttttgcccctcgcactccttcttcatgccgctcgccccaactgggtcaacgtgattagcgatttgaagaaaatcgaggaccttatacagtctatgcatattgacgctacactgtatactgagagtgatgtacacccgtcctgtaaggtaacggccatgaaatgctttcttctggagctccaggtcatcagcttggagtctggggacgcaagcatccacgatacggttgaaaacctcatcatccttgcgaacaactctctctcatctaatggaaacgttacagagagtgggtgtaaggagtgcgaagagttggaagaaaaaaacatcaaagaatttcttcaatccttcgttcacatagtgcaaatgttcattaacacgtccactaccacacccgccccgaggccacctacgccggcaccgactatcgccagtcaacccctctctctgcgccccgaggcttgccggcctgcggctggtggggcggtccacacccggggcctggattttgcgtgcgatatatacatctgggcacctcttgccggcacctgcggagtgctgcttctctcactcgttattacgctgtactgc

SEQ ID NO: 2874 - DNA, 2181 bp, synthetic construct
  misc_feature 1..2181: note = Synthetic
  source 1..2181: mol_type = other DNA
atggccttaccagtgaccgccttgctcctgccgctggccttgctgctccacgccgccaggccggacatcgtgatgacccagcctcctctgagcagccctgtgacactgggccagccagctagcatcagctgtagatcttctcagtccctggtgcacagcgacggcaatacctacctgtcttggctgcagcagcggcctggccagccccccagactgctgatctacaaggtgtccaaccgcttcagcggcgtgccagacagattcagcggctctggcgccggcaccgacttcaccctgaagatcagcagagtcgaggccgaagatgtgggagtttactattgcacccaagctacacagttcccccacacctttggccagggcaccaagctcgagatcaagggcagcaccagcggcagcggcaagcccggctccggagagggcagcaccaagggccaagtgcagctggtccagagcggcgctgaggtgaagaaacctggcgcctctgtgaaagtgtcctgcaaggccagcggctacacctttaccagctacggcattagctgggtgcggcaggcccctggccagggtcttgagtggatgggctggatcagcgcctacaacggccacacagattatacacaaaagctgcagggcagagtgaccatgacaaccgataccagcaccaccacagcctacatggaactgagaagcctgagctctgccgacaccgccgtgtactactgcgtgcgggaagtggtgctgcctaccacagactactactacttctacatggacgtgtggggcaagggcaccacagtgacagtcagctccgcggccgcaaccacgacgccagcgccgcggccaccaacaccggcgcccaccatcgcgtcgcagcccctgtccctgcgcccagaggcgtgccggccagcggcggggggcgcagtgcacacgagggggctggacttcgcctgtgatatctacatctgggcgcccttggccgggacttgtggggtccttctcctgtcactggttatcaccctttactgcaaacggggcagaaagaaactcctgtatatattcaaacaaccatttatgagaccagtacaaactactcaagaggaagatggctgtagctgccgatttccagaagaagaagaaggaggatgtgaactgagagtgaagttcagcaggagcgcagacgcccccgcgtaccagcagggccagaaccagctctataacgagctcaatctaggacgaagagaggagtacgatgttttggacaagagacgtggccgggaccctgagatggggggaaagccgagaaggaagaaccctcaggaaggcctgtacaatgaactgcagaaagataagatggcggaggcctacagtgagattgggatgaaaggcgagcgccggaggggcaaggggcacgatggcctttaccagggtctcagtacagccaccaaggacacctacgacgcccttcacatgcaggccctgccccctcgcggctctggcgagggaaggggttccctgcttacttgcggcgacgtcgaagagaatcccggtccgatggccctcccagtaactgccctccttttgcccctcgcactccttcttcatgccgctcgccccaactgggtcaacgtgattagcgatttgaagaaaatcgaggaccttatacagtctatgcatattgacgctacactgtatactgagagtgatgtacacccgtcctgtaaggtaacggccatgaaatgctttcttctggagctccaggtcatcagcttggagtctggggacgcaagcatccacgatacggttgaaaacctcatcatccttgcgaacaactctctctcatctaatggaaacgttacagagagtgggtgtaaggagtgcgaagagttggaagaaaaaaacatcaaagaatttcttcaatccttcgttcacatagtgcaaatgttcattaacacgtccactaccacacccgccccgaggccacctacgccggcaccgactatcgccagtcaacccctctctctgcgccccgaggcttgccggcctgcggctggtggggcggtccacacccggggcctggattttgcgtgcgatatatacatctgggcacctcttgccggcacctgcggagtgctgcttctctcactcgttattacgctgtactgc

SEQ ID NO: 2875 - DNA, 2178 bp, synthetic construct
  misc_feature 1..2178: note = Synthetic
  source 1..2178: mol_type = other DNA
atggccttaccagtgaccgccttgctcctgccgctggccttgctgctccacgccgccaggccggatatccagatgacacagagcccaagcagcctgagcgccagcgtgggcgacagagtgaccatcacatgcagagccagccagggcatcagcagctggctggcttggtaccagcaaaagcctgagaaggcccctaagagcctcatctacgccgctagcagcctgcagtccggcgtgccaagcagattcagcggctctggctctggcacagacttcaccctgaccatttccagcctgcaacctgaggattttgccacatactattgtcagcagtacaacagctacccttacaccttcggccagggcaccaagctggaaatcaagggcagcaccagcggcagcggcaagcccggctccggagagggcagcaccaagggccaagttcagctggtgcagagcggagccgaggtgaaaaagcccggcgcttctgtgaaggtgtcctgcaaggtgtctggctacaccctgacagagctgagcatgcactgggtccggcaggcccctggcaaaggcctggaatggatgggaggcttcgaccccgaagacggggagacaatctacgcccagaaattccagggcagagtgacaatgaccgaggacaccagcaccgatacagcctacatggaactgtcttccctgcggagcgaggacaccgccgtgtactactgcgccaccggcagaatcaccatggtgcggggcgtcatcatcccctactactattactacatggacgtgtggggcaagggcaccaccgtgaccgtgtcctctgcggccgcaaccacgacgccagcgccgcggccaccaacaccggcgcccaccatcgcgtcgcagcccctgtccctgcgcccagaggcgtgccggccagcggcggggggcgcagtgcacacgagggggctggacttcgcctgtgatatctacatctgggcgcccttggccgggacttgtggggtccttctcctgtcactggttatcaccctttactgcaaacggggcagaaagaaactcctgtatatattcaaacaaccatttatgagaccagtacaaactactcaagaggaagatggctgtagctgccgatttccagaagaagaagaaggaggatgtgaactgagagtgaagttcagcaggagcgcagacgcccccgcgtaccagcagggccagaaccagctctataacgagctcaatctaggacgaagagaggagtacgatgttttggacaagagacgtggccgggaccctgagatggggggaaagccgagaaggaagaaccctcaggaaggcctgtacaatgaactgcagaaagataagatggcggaggcctacagtgagattgggatgaaaggcgagcgccggaggggcaaggggcacgatggcctttaccagggtctcagtacagccaccaaggacacctacgacgcccttcacatgcaggccctgccccctcgcggctctggcgagggaaggggttccctgcttacttgcggcgacgtcgaagagaatcccggtccgatggccctcccagtaactgccctccttttgcccctcgcactccttcttcatgccgctcgccccaactgggtcaacgtgattagcgatttgaagaaaatcgaggaccttatacagtctatgcatattgacgctacactgtatactgagagtgatgtacacccgtcctgtaaggtaacggccatgaaatgctttcttctggagctccaggtcatcagcttggagtctggggacgcaagcatccacgatacggttgaaaacctcatcatccttgcgaacaactctctctcatctaatggaaacgttacagagagtgggtgtaaggagtgcgaagagttggaagaaaaaaacatcaaagaatttcttcaatccttcgttcacatagtgcaaatgttcattaacacgtccactaccacacccgccccgaggccacctacgccggcaccgactatcgccagtcaacccctctctctgcgccccgaggcttgccggcctgcggctggtggggcggtccacacccggggcctggattttgcgtgcgatatatacatctgggcacctcttgccggcacctgcggagtgctgcttctctcactcgttattacgctgtactgc

SEQ ID NO: 2876 - DNA, 2172 bp, synthetic construct
  misc_feature 1..2172: note = Synthetic
  source 1..2172: mol_type = other DNA
atggccttaccagtgaccgccttgctcctgccgctggccttgctgctccacgccgccaggccggatatcgtgatgacccagacccccctgagcctgtccgtgaccccaggacaacctgccagcattagctgcaagagcagcaagtccctgctgcacagcgacggcaagacatacctgtactggtacctgcaaaagcccggccagcctcctcagctgctcatctacgaggtgtccaaccggttctctggcgtgcctgatagattcagcggaagcggcagcggaacagacttcacactgaagatcagcagagtcgaggccgaggacgtgggcgtttactactgcatgcagagcatccagttcccctggacattcggccagggcacaaaagtggaaatcaagggcagcaccagcggcagcggcaagcccggctccggagagggcagcaccaagggccaagtgcagctggtgcagagcggcaccgaggtgaagaagccaggcgcctctgtgaaagtgtcttgtaaagccagcggctacacctttaccaattacggcatcggctgggtgcggcaggcccctggacagggactggaatggatgggctggatcatcgcctacaacggctacacaaagtacgcccagatcctgcagggcagagtgacaatgaccaccgacaccagcaccaacaccgcttatatggaactgagaagcctgcggagcgacgacaccgccgtgtactattgcgccagacagcagctgggcggagattaccactactacatggacgtgtggggcaagggcaccaccgtcacagtgtccagcgcggccgcaaccacgacgccagcgccgcggccaccaacaccggcgcccaccatcgcgtcgcagcccctgtccctgcgcccagaggcgtgccggccagcggcggggggcgcagtgcacacgagggggctggacttcgcctgtgatatctacatctgggcgcccttggccgggacttgtggggtccttctcctgtcactggttatcaccctttactgcaaacggggcagaaagaaactcctgtatatattcaaacaaccatttatgagaccagtacaaactactcaagaggaagatggctgtagctgccgatttccagaagaagaagaaggaggatgtgaactgagagtgaagttcagcaggagcgcagacgcccccgcgtaccagcagggccagaaccagctctataacgagctcaatctaggacgaagagaggagtacgatgttttggacaagagacgtggccgggaccctgagatggggggaaagccgagaaggaagaaccctcaggaaggcctgtacaatgaactgcagaaagataagatggcggaggcctacagtgagattgggatgaaaggcgagcgccggaggggcaaggggcacgatggcctttaccagggtctcagtacagccaccaaggacacctacgacgcccttcacatgcaggccctgccccctcgcggctctggcgagggaaggggttccctgcttacttgcggcgacgtcgaagagaatcccggtccgatggccctcccagtaactgccctccttttgcccctcgcactccttcttcatgccgctcgccccaactgggtcaacgtgattagcgatttgaagaaaatcgaggaccttatacagtctatgcatattgacgctacactgtatactgagagtgatgtacacccgtcctgtaaggtaacggccatgaaatgctttcttctggagctccaggtcatcagcttggagtctggggacgcaagcatccacgatacggttgaaaacctcatcatccttgcgaacaactctctctcatctaatggaaacgttacagagagtgggtgtaaggagtgcgaagagttggaagaaaaaaacatcaaagaatttcttcaatccttcgttcacatagtgcaaatgttcattaacacgtccactaccacacccgccccgaggccacctacgccggcaccgactatcgccagtcaacccctctctctgcgccccgaggcttgccggcctgcggctggtggggcggtccacacccggggcctggattttgcgtgcgatatatacatctgggcacctcttgccggcacctgcggagtgctgcttctctcactcgttattacgctgtactgc

SEQ ID NO: 2877 - DNA, 2172 bp, synthetic construct
  misc_feature 1..2172: note = Synthetic
  source 1..2172: mol_type = other DNA
atggccttaccagtgaccgccttgctcctgccgctggccttgctgctccacgccgccaggccggacatcgtgatgacccagacccctctgagcctgagcgtgacacctggacagcccgcttctattagctgtaaaagcagcaagtccctgctgcacagcgacggcaagacctacctgtactggtacctgcagaaacctggccagcctccacagctgctgatctacgaggtgtctacaagattcagcggagtgcctgatagattcagcggcagcggatctggaacagatttcaccctgaagatcagccgggttgaggccgaggacgtgggcgtgtactattgcatgcagtccatccagttcccctggaccttcggccagggcacaaaggtggaaatcaagggcagcaccagcggcagcggcaagcccggctccggagagggcagcaccaagggccaagtgcagctggtgcaaagcggcaccgaggtgaaaaagcccggcgcctctgtgaaggtctcctgcaaggccagcggatacacatttacaaattacggcatcggctgggtgcggcaggcccctggccagggcctggaatggatgggctggatcatcgcctacaacggctacaccaagtacgcccagatcctgcaaggcagagtcaccatgaccacagacaccagcaccaacaccgcttatatggaactgagaagcctgcggagcgacgatacagccgtgtactactgcgccagacagcagctcggcggcgactaccactactacatggacgtgtggggcaagggcaccaccgtgaccgtgtccagcgcggccgcaaccacgacgccagcgccgcggccaccaacaccggcgcccaccatcgcgtcgcagcccctgtccctgcgcccagaggcgtgccggccagcggcggggggcgcagtgcacacgagggggctggacttcgcctgtgatatctacatctgggcgcccttggccgggacttgtggggtccttctcctgtcactggttatcaccctttactgcaaacggggcagaaagaaactcctgtatatattcaaacaaccatttatgagaccagtacaaactactcaagaggaagatggctgtagctgccgatttccagaagaagaagaaggaggatgtgaactgagagtgaagttcagcaggagcgcagacgcccccgcgtaccagcagggccagaaccagctctataacgagctcaatctaggacgaagagaggagtacgatgttttggacaagagacgtggccgggaccctgagatggggggaaagccgagaaggaagaaccctcaggaaggcctgtacaatgaactgcagaaagataagatggcggaggcctacagtgagattgggatgaaaggcgagcgccggaggggcaaggggcacgatggcctttaccagggtctcagtacagccaccaaggacacctacgacgcccttcacatgcaggccctgccccctcgcggctctggcgagggaaggggttccctgcttacttgcggcgacgtcgaagagaatcccggtccgatggccctcccagtaactgccctccttttgcccctcgcactccttcttcatgccgctcgccccaactgggtcaacgtgattagcgatttgaagaaaatcgaggaccttatacagtctatgcatattgacgctacactgtatactgagagtgatgtacacccgtcctgtaaggtaacggccatgaaatgctttcttctggagctccaggtcatcagcttggagtctggggacgcaagcatccacgatacggttgaaaacctcatcatccttgcgaacaactctctctcatctaatggaaacgttacagagagtgggtgtaaggagtgcgaagagttggaagaaaaaaacatcaaagaatttcttcaatccttcgttcacatagtgcaaatgttcattaacacgtccactaccacacccgccccgaggccacctacgccggcaccgactatcgccagtcaacccctctctctgcgccccgaggcttgccggcctgcggctggtggggcggtccacacccggggcctggattttgcgtgcgatatatacatctgggcacctcttgccggcacctgcggagtgctgcttctctcactcgttattacgctgtactgc

SEQ ID NO: 2878 - DNA, 2166 bp, synthetic construct
  misc_feature 1..2166: note = Synthetic
  source 1..2166: mol_type = other DNA
atggccttaccagtgaccgccttgctcctgccgctggccttgctgctccacgccgccaggccggatatccagatgacacagtcccctagctctctgtctgcttctgttggagatagagtgaccatcacctgccgggccagccagggcatcagcaactggctggcctggtaccagcagaagcccgagaaggcccctaagagcctgatctacgccgctagctccctccagggcggcgtgccatctagattcagcggctcaggcagcggaaccgacttcaccctgaccatcagctccctgcaacctgaggattttgccacatactactgccagcaatacgacagctacccctacaccttcggccagggcaccaagctggaaatcaagggcagcaccagcggcagcggcaagcccggctccggagagggcagcaccaagggccaagtgcagctggtgcagagcggaacagaggtgaaaaagcctggcgccagcgtgaaggtgtcttgtaaaaccagcggttatacattcacctcctacgacattaactgggtgcggcaggccaccggccagggcctggaatggatgggctggatgaaccccatctccggcgacacaggcagcgcccagaagttccagggaagagtgaccatgaccagaaataccagcatcggcaccgcctacatggaactgagcagcctgcggagcgaggacaccgccgtgtactactgcgccagaggcggatactgtagcagtacatcttgctactactattacatggacgtgtggggcaagggcacaacagtgacagtcagcagcgcggccgcaaccacgacgccagcgccgcggccaccaacaccggcgcccaccatcgcgtcgcagcccctgtccctgcgcccagaggcgtgccggccagcggcggggggcgcagtgcacacgagggggctggacttcgcctgtgatatctacatctgggcgcccttggccgggacttgtggggtccttctcctgtcactggttatcaccctttactgcaaacggggcagaaagaaactcctgtatatattcaaacaaccatttatgagaccagtacaaactactcaagaggaagatggctgtagctgccgatttccagaagaagaagaaggaggatgtgaactgagagtgaagttcagcaggagcgcagacgcccccgcgtaccagcagggccagaaccagctctataacgagctcaatctaggacgaagagaggagtacgatgttttggacaagagacgtggccgggaccctgagatggggggaaagccgagaaggaagaaccctcaggaaggcctgtacaatgaactgcagaaagataagatggcggaggcctacagtgagattgggatgaaaggcgagcgccggaggggcaaggggcacgatggcctttaccagggtctcagtacagccaccaaggacacctacgacgcccttcacatgcaggccctgccccctcgcggctctggcgagggaaggggttccctgcttacttgcggcgacgtcgaagagaatcccggtccgatggccctcccagtaactgccctccttttgcccctcgcactccttcttcatgccgctcgccccaactgggtcaacgtgattagcgatttgaagaaaatcgaggaccttatacagtctatgcatattgacgctacactgtatactgagagtgatgtacacccgtcctgtaaggtaacggccatgaaatgctttcttctggagctccaggtcatcagcttggagtctggggacgcaagcatccacgatacggttgaaaacctcatcatccttgcgaacaactctctctcatctaatggaaacgttacagagagtgggtgtaaggagtgcgaagagttggaagaaaaaaacatcaaagaatttcttcaatccttcgttcacatagtgcaaatgttcattaacacgtccactaccacacccgccccgaggccacctacgccggcaccgactatcgccagtcaacccctctctctgcgccccgaggcttgccggcctgcggctggtggggcggtccacacccggggcctggattttgcgtgcgatatatacatctgggcacctcttgccggcacctgcggagtgctgcttctctcactcgttattacgctgtactgc

SEQ ID NO: 2879 - DNA, 2166 bp, synthetic construct
  misc_feature 1..2166: note = Synthetic
  source 1..2166: mol_type = other DNA
atggccttaccagtgaccgccttgctcctgccgctggccttgctgctccacgccgccaggccggacatccagatgacacagagccctagcagcctgagcgcctctgtgggcgaccgggtgaccatcacctgcagagccagccagggcatcagcagctggctggcctggtaccagcagaagcccgagaaggcccctaagtccctgatctacgccgccagctccctccagggcggagtgccatctagattcagcggctctggatctggcacagacttcaccctgaccatcagctctctgcagcctgaggattttgccacatactactgccagcaatacgacagctacccctacacattcggccaaggcacaaagctggaaatcaagggcagcaccagcggcagcggcaagcccggctccggagagggcagcaccaagggccaagtgcagctggtgcagagcggcgccgaggtgaagaagcctggcgcttccgtgaaggtgtcctgtaaagcttctggatacaccttcacctcttatgatattaactgggtgcggcaggccaccggccagggcctggaatggatgggctggatgatccccaacagcggcgataccggctccgcccagaaattccagggaagagttaccatgacaagaaacaccagcatcagcaccgcctacatggaactgagcagcctgcggagcgaggacaccgctgtgtactactgcgccagaggcggctactgtaatagcacaagctgctactattactacatggacgtgtggggcaagggcaccacagtgacagtcagctccgcggccgcaaccacgacgccagcgccgcggccaccaacaccggcgcccaccatcgcgtcgcagcccctgtccctgcgcccagaggcgtgccggccagcggcggggggcgcagtgcacacgagggggctggacttcgcctgtgatatctacatctgggcgcccttggccgggacttgtggggtccttctcctgtcactggttatcaccctttactgcaaacggggcagaaagaaactcctgtatatattcaaacaaccatttatgagaccagtacaaactactcaagaggaagatggctgtagctgccgatttccagaagaagaagaaggaggatgtgaactgagagtgaagttcagcaggagcgcagacgcccccgcgtaccagcagggccagaaccagctctataacgagctcaatctaggacgaagagaggagtacgatgttttggacaagagacgtggccgggaccctgagatggggggaaagccgagaaggaagaaccctcaggaaggcctgtacaatgaactgcagaaagataagatggcggaggcctacagtgagattgggatgaaaggcgagcgccggaggggcaaggggcacgatggcctttaccagggtctcagtacagccaccaaggacacctacgacgcccttcacatgcaggccctgccccctcgcggctctggcgagggaaggggttccctgcttacttgcggcgacgtcgaagagaatcccggtccgatggccctcccagtaactgccctccttttgcccctcgcactccttcttcatgccgctcgccccaactgggtcaacgtgattagcgatttgaagaaaatcgaggaccttatacagtctatgcatattgacgctacactgtatactgagagtgatgtacacccgtcctgtaaggtaacggccatgaaatgctttcttctggagctccaggtcatcagcttggagtctggggacgcaagcatccacgatacggttgaaaacctcatcatccttgcgaacaactctctctcatctaatggaaacgttacagagagtgggtgtaaggagtgcgaagagttggaagaaaaaaacatcaaagaatttcttcaatccttcgttcacatagtgcaaatgttcattaacacgtccactaccacacccgccccgaggccacctacgccggcaccgactatcgccagtcaacccctctctctgcgccccgaggcttgccggcctgcggctggtggggcggtccacacccggggcctggattttgcgtgcgatatatacatctgggcacctcttgccggcacctgcggagtgctgcttctctcactcgttattacgctgtactgc

SEQ ID NO: 2880 - DNA, 2169 bp, synthetic construct
  misc_feature 1..2169: note = Synthetic
  source 1..2169: mol_type = other DNA
atggccttaccagtgaccgccttgctcctgccgctggccttgctgctccacgccgccaggccggagatcgtgctgacccaaagccccggcaccctgagcctgagccctggcgagagagccaccctgtcttgtagagcctctcagagcgtttctagctcctacctggcctggtaccagcagaagcccggacaggcccctagactgctgatctacggcgccagcagcagagctacaggcatccccgatagattcagcgacagcggctcaggcacagacttcaccctgacaattagccggctggaacccgaggatttcgccgtgtactattgccagcactacggcagctctcctccaagaatcaccttcggccctggcaccaaggtggacatcaaaggcagcaccagcggcagcggcaagcccggctccggagagggcagcaccaagggcgaggtgcagctgctggaaagcggaggcggcctggtgcaacctggaggttctctgcggctgagctgcgccgctagcggcttcacatttagcagctacgtgatgaactgggtgcggcaggctcctggaaagggcctggaatgggtctccagcgtgtccggcagcggcaacaacagcttttacgccgatagcgtgaagggcagattcaccatcagccgggacaacagcaagaacaccctctacctgcagatgaattctctgagagccgaggacaccgccgtgtactactgcgccagcaggtcctcttcttacctgtactactactattacatggacgtgtggggcaaaggcacaacagtgaccgtctccagcgcggccgcaaccacgacgccagcgccgcggccaccaacaccggcgcccaccatcgcgtcgcagcccctgtccctgcgcccagaggcgtgccggccagcggcggggggcgcagtgcacacgagggggctggacttcgcctgtgatatctacatctgggcgcccttggccgggacttgtggggtccttctcctgtcactggttatcaccctttactgcaaacggggcagaaagaaactcctgtatatattcaaacaaccatttatgagaccagtacaaactactcaagaggaagatggctgtagctgccgatttccagaagaagaagaaggaggatgtgaactgagagtgaagttcagcaggagcgcagacgcccccgcgtaccagcagggccagaaccagctctataacgagctcaatctaggacgaagagaggagtacgatgttttggacaagagacgtggccgggaccctgagatggggggaaagccgagaaggaagaaccctcaggaaggcctgtacaatgaactgcagaaagataagatggcggaggcctacagtgagattgggatgaaaggcgagcgccggaggggcaaggggcacgatggcctttaccagggtctcagtacagccaccaaggacacctacgacgcccttcacatgcaggccctgccccctcgcggctctggcgagggaaggggttccctgcttacttgcggcgacgtcgaagagaatcccggtccgatggccctcccagtaactgccctccttttgcccctcgcactccttcttcatgccgctcgccccaactgggtcaacgtgattagcgatttgaagaaaatcgaggaccttatacagtctatgcatattgacgctacactgtatactgagagtgatgtacacccgtcctgtaaggtaacggccatgaaatgctttcttctggagctccaggtcatcagcttggagtctggggacgcaagcatccacgatacggttgaaaacctcatcatccttgcgaacaactctctctcatctaatggaaacgttacagagagtgggtgtaaggagtgcgaagagttggaagaaaaaaacatcaaagaatttcttcaatccttcgttcacatagtgcaaatgttcattaacacgtccactaccacacccgccccgaggccacctacgccggcaccgactatcgccagtcaacccctctctctgcgccccgaggcttgccggcctgcggctggtggggcggtccacacccggggcctggattttgcgtgcgatatatacatctgggcacctcttgccggcacctgcggagtgctgcttctctcactcgttattacgctgtactgc

SEQ ID NO: 2881 - protein, 226 aa, synthetic construct
  REGION 1..226: note = Synthetic
AAATTTPAPRPPTPAPTIASQPLSLRPEACRPAAGGAVHTRGLDFACDIYIWAPLAGTCGVLLLSLVITLYCKRGRKKLLYIFKQPFMRPVQTTQEEDGCSCRFPEEEEGGCELRVKFSRSADAPAYQQGQNQLYNELNLGRREEYDVLDKRRGRDPEMGGKPRRKNPQEGLYNELQKDKMAEAYSEIGMKGERRRGKGHDGLYQGLSTATKDTYDALHMQALPPR

SEQ ID NO: 2882 - DNA, 678 bp, synthetic construct
  misc_feature 1..678: note = Synthetic
  source 1..678: mol_type = other DNA
gcggccgcaaccacgacgccagcgccgcggccaccaacaccggcgcccaccatcgcgtcgcagcccctgtccctgcgcccagaggcgtgccggccagcggcggggggcgcagtgcacacgagggggctggacttcgcctgtgatatctacatctgggcgcccttggccgggacttgtggggtccttctcctgtcactggttatcaccctttactgcaaacggggcagaaagaaactcctgtatatattcaaacaaccatttatgagaccagtacaaactactcaagaggaagatggctgtagctgccgatttccagaagaagaagaaggaggatgtgaactgagagtgaagttcagcaggagcgcagacgcccccgcgtaccagcagggccagaaccagctctataacgagctcaatctaggacgaagagaggagtacgatgttttggacaagagacgtggccgggaccctgagatggggggaaagccgagaaggaagaaccctcaggaaggcctgtacaatgaactgcagaaagataagatggcggaggcctacagtgagattgggatgaaaggcgagcgccggaggggcaaggggcacgatggcctttaccagggtctcagtacagccaccaaggacacctacgacgcccttcacatgcaggccctgccccctcgc

SEQ ID NO: 2883 - protein, 451 aa, synthetic construct
  REGION 1..451: note = Synthetic
AAATTTPAPRPPTPAPTIASQPLSLRPEACRPAAGGAVHTRGLDFACDIYIWAPLAGTCGVLLLSLVITLYCKRGRKKLLYIFKQPFMRPVQTTQEEDGCSCRFPEEEEGGCELRVKFSRSADAPAYQQGQNQLYNELNLGRREEYDVLDKRRGRDPEMGGKPRRKNPQEGLYNELQKDKMAEAYSEIGMKGERRRGKGHDGLYQGLSTATKDTYDALHMQALPPRGSGEGRGSLLTCGDVEENPGPMALPVTALLLPLALLLHAARPNWVNVISDLKKIEDLIQSMHIDATLYTESDVHPSCKVTAMKCFLLELQVISLESGDASIHDTVENLIILANNSLSSNGNVTESGCKECEELEEKNIKEFLQSFVHIVQMFINTSTTTPAPRPPTPAPTIASQPLSLRPEACRPAAGGAVHTRGLDFACDIYIWAPLAGTCGVLLLSLVITLYC

SEQ ID NO: 2884 - DNA, 1353 bp, synthetic construct
  misc_feature 1..1353: note = Synthetic
  source 1..1353: mol_type = other DNA
gcggccgcaaccacgacgccagcgccgcggccaccaacaccggcgcccaccatcgcgtcgcagcccctgtccctgcgcccagaggcgtgccggccagcggcggggggcgcagtgcacacgagggggctggacttcgcctgtgatatctacatctgggcgcccttggccgggacttgtggggtccttctcctgtcactggttatcaccctttactgcaaacggggcagaaagaaactcctgtatatattcaaacaaccatttatgagaccagtacaaactactcaagaggaagatggctgtagctgccgatttccagaagaagaagaaggaggatgtgaactgagagtgaagttcagcaggagcgcagacgcccccgcgtaccagcagggccagaaccagctctataacgagctcaatctaggacgaagagaggagtacgatgttttggacaagagacgtggccgggaccctgagatggggggaaagccgagaaggaagaaccctcaggaaggcctgtacaatgaactgcagaaagataagatggcggaggcctacagtgagattgggatgaaaggcgagcgccggaggggcaaggggcacgatggcctttaccagggtctcagtacagccaccaaggacacctacgacgcccttcacatgcaggccctgccccctcgcggctctggcgagggaaggggttccctgcttacttgcggcgacgtcgaagagaatcccggtccgatggccctcccagtaactgccctccttttgcccctcgcactccttcttcatgccgctcgccccaactgggtcaacgtgattagcgatttgaagaaaatcgaggaccttatacagtctatgcatattgacgctacactgtatactgagagtgatgtacacccgtcctgtaaggtaacggccatgaaatgctttcttctggagctccaggtcatcagcttggagtctggggacgcaagcatccacgatacggttgaaaacctcatcatccttgcgaacaactctctctcatctaatggaaacgttacagagagtgggtgtaaggagtgcgaagagttggaagaaaaaaacatcaaagaatttcttcaatccttcgttcacatagtgcaaatgttcattaacacgtccactaccacacccgccccgaggccacctacgccggcaccgactatcgccagtcaacccctctctctgcgccccgaggcttgccggcctgcggctggtggggcggtccacacccggggcctggattttgcgtgcgatatatacatctgggcacctcttgccggcacctgcggagtgctgcttctctcactcgttattacgctgtactgc

SEQ ID NO: 2885 - protein, 42 aa, synthetic construct
  REGION 1..42: note = Synthetic
KRGRKKLLYIFKQPFMRPVQTTQEEDGCSCRFPEEEEGGCEL

SEQ ID NO: 2886 - DNA, 126 bp, synthetic construct
  misc_feature 1..126: note = Synthetic
  source 1..126: mol_type = other DNA
aaacggggcagaaagaaactcctgtatatattcaaacaaccatttatgagaccagtacaaactactcaagaggaagatggctgtagctgccgatttccagaagaagaagaaggaggatgtgaactg

SEQ ID NO: 2887 - protein, 21 aa, synthetic construct
  REGION 1..21: note = Synthetic
MALPVTALLLPLALLLHAARP

SEQ ID NO: 2888 - protein, 21 aa, synthetic construct
  REGION 1..21: note = Synthetic
MALPVTALLLPLALLLHAARP

SEQ ID NO: 2889 - protein, 21 aa, synthetic construct
  REGION 1..21: note = Synthetic
MALPVTALLLPLALLLHAARP

SEQ ID NO: 2890 - protein, 21 aa, synthetic construct
  REGION 1..21: note = Synthetic
MALPVTALLLPLALLLHAARP

SEQ ID NO: 2891 - protein, 21 aa, synthetic construct
  REGION 1..21: note = Synthetic
MALPVTALLLPLALLLHAARP

SEQ ID NO: 2892 - protein, 21 aa, synthetic construct
  REGION 1..21: note = Synthetic
MALPVTALLLPLALLLHAARP

SEQ ID NO: 2893 - protein, 21 aa, synthetic construct
  REGION 1..21: note = Synthetic
MALPVTALLLPLALLLHAARP

SEQ ID NO: 2894 - protein, 21 aa, synthetic construct
  REGION 1..21: note = Synthetic
MALPVTALLLPLALLLHAARP

SEQ ID NO: 2895 - protein, 21 aa, synthetic construct
  REGION 1..21: note = Synthetic
MALPVTALLLPLALLLHAARP

SEQ ID NO: 2896 - protein, 21 aa, synthetic construct
  REGION 1..21: note = Synthetic
MALPVTALLLPLALLLHAARP

SEQ ID NO: 2897 - protein, 21 aa, synthetic construct
  REGION 1..21: note = Synthetic
MALPVTALLLPLALLLHAARP

SEQ ID NO: 2898 - protein, 21 aa, synthetic construct
  REGION 1..21: note = Synthetic
MALPVTALLLPLALLLHAARP

SEQ ID NO: 2899 - protein, 21 aa, synthetic construct
  REGION 1..21: note = Synthetic
MALPVTALLLPLALLLHAARP

SEQ ID NO: 2900 - protein, 21 aa, synthetic construct
  REGION 1..21: note = Synthetic
MALPVTALLLPLALLLHAARP

SEQ ID NO: 2901 - protein, 21 aa, synthetic construct
  REGION 1..21: note = Synthetic
MALPVTALLLPLALLLHAARP

SEQ ID NO: 2902 - protein, 21 aa, synthetic construct
  REGION 1..21: note = Synthetic
MALPVTALLLPLALLLHAARP

SEQ ID NO: 2903 - protein, 21 aa, synthetic construct
  REGION 1..21: note = Synthetic
MALPVTALLLPLALLLHAARP

SEQ ID NO: 2904 - protein, 21 aa, synthetic construct
  REGION 1..21: note = Synthetic
MALPVTALLLPLALLLHAARP

SEQ ID NO: 2905 - protein, 21 aa, synthetic construct
  REGION 1..21: note = Synthetic
MALPVTALLLPLALLLHAARP

SEQ ID NO: 2906 - protein, 21 aa, synthetic construct
  REGION 1..21: note = Synthetic
MALPVTALLLPLALLLHAARP

SEQ ID NO: 2907 - protein, 21 aa, synthetic construct
  REGION 1..21: note = Synthetic
MALPVTALLLPLALLLHAARP

SEQ ID NO: 2908 - protein, 21 aa, synthetic construct
  REGION 1..21: note = Synthetic
MALPVTALLLPLALLLHAARP

SEQ ID NO: 2909 - protein, 21 aa, synthetic construct
  REGION 1..21: note = Synthetic
MALPVTALLLPLALLLHAARP

SEQ ID NO: 2910 - DNA, 63 bp, synthetic construct; identical to SEQ ID NO: 1374
  misc_feature 1..63: note = Synthetic
  source 1..63: mol_type = other DNA

SEQ ID NO: 2911 - DNA, 63 bp, synthetic construct; identical to SEQ ID NO: 1374
  misc_feature 1..63: note = Synthetic
  source 1..63: mol_type = other DNA

SEQ ID NO: 2912 - DNA, 63 bp, synthetic construct; identical to SEQ ID NO: 1374
  misc_feature 1..63: note = Synthetic
  source 1..63: mol_type = other DNA

SEQ ID NO: 2913 - DNA, 63 bp, synthetic construct; identical to SEQ ID NO: 1374
  misc_feature 1..63: note = Synthetic
  source 1..63: mol_type = other DNA

SEQ ID NO: 2914 - DNA, 63 bp, synthetic construct; identical to SEQ ID NO: 1374
  misc_feature 1..63: note = Synthetic
  source 1..63: mol_type = other DNA

SEQ ID NO: 2915 - DNA, 63 bp, synthetic construct; identical to SEQ ID NO: 1374
  misc_feature 1..63: note = Synthetic
  source 1..63: mol_type = other DNA

SEQ ID NO: 2916 - DNA, 63 bp, synthetic construct; identical to SEQ ID NO: 1374
  misc_feature 1..63: note = Synthetic
  source 1..63: mol_type = other DNA

SEQ ID NO: 2917 - DNA, 63 bp, synthetic construct; identical to SEQ ID NO: 1374
  misc_feature 1..63: note = Synthetic
  source 1..63: mol_type = other DNA

SEQ ID NO: 2918 - DNA, 63 bp, synthetic construct; identical to SEQ ID NO: 1374
  misc_feature 1..63: note = Synthetic
  source 1..63: mol_type = other DNA

SEQ ID NO: 2919 - DNA, 63 bp, synthetic construct; identical to SEQ ID NO: 1374
  misc_feature 1..63: note = Synthetic
  source 1..63: mol_type = other DNA

SEQ ID NO: 2920 - DNA, 63 bp, synthetic construct; identical to SEQ ID NO: 1374
  misc_feature 1..63: note = Synthetic
  source 1..63: mol_type = other DNA

SEQ ID NO: 2921 - DNA, 63 bp, synthetic construct; identical to SEQ ID NO: 1374
  misc_feature 1..63: note = Synthetic
  source 1..63: mol_type = other DNA

SEQ ID NO: 2922 - DNA, 63 bp, synthetic construct; identical to SEQ ID NO: 1374
  misc_feature 1..63: note = Synthetic
  source 1..63: mol_type = other DNA

SEQ ID NO: 2923 - DNA, 63 bp, synthetic construct; identical to SEQ ID NO: 1374
  misc_feature 1..63: note = Synthetic
  source 1..63: mol_type = other DNA

SEQ ID NO: 2924 - DNA, 63 bp, synthetic construct; identical to SEQ ID NO: 1374
  misc_feature 1..63: note = Synthetic
  source 1..63: mol_type = other DNA

SEQ ID NO: 2925 - DNA, 63 bp, synthetic construct; identical to SEQ ID NO: 1374
  misc_feature 1..63: note = Synthetic
  source 1..63: mol_type = other DNA

SEQ ID NO: 2926 - DNA, 63 bp, synthetic construct; identical to SEQ ID NO: 1374
  misc_feature 1..63: note = Synthetic
  source 1..63: mol_type = other DNA

SEQ ID NO: 2927 - DNA, 63 bp, synthetic construct; identical to SEQ ID NO: 1374
  misc_feature 1..63: note = Synthetic
  source 1..63: mol_type = other DNA

SEQ ID NO: 2928 - DNA, 63 bp, synthetic construct; identical to SEQ ID NO: 1374
  misc_feature 1..63: note = Synthetic
  source 1..63: mol_type = other DNA

SEQ ID NO: 2929 - DNA, 63 bp, synthetic construct; identical to SEQ ID NO: 1374
  misc_feature 1..63: note = Synthetic
  source 1..63: mol_type = other DNA

SEQ ID NO: 2930 - DNA, 63 bp, synthetic construct; identical to SEQ ID NO: 1374
  misc_feature 1..63: note = Synthetic
  source 1..63: mol_type = other DNA

SEQ ID NO: 2931 - DNA, 63 bp, synthetic construct; identical to SEQ ID NO: 1374
  misc_feature 1..63: note = Synthetic
  source 1..63: mol_type = other DNA

SEQ ID NO: 2932 - DNA, 63 bp, synthetic construct; identical to SEQ ID NO: 1374
  misc_feature 1..63: note = Synthetic
  source 1..63: mol_type = other DNA

SEQ ID NO: 2933 - protein, 25 aa, synthetic construct
  REGION 1..25: note = Synthetic
EVQLLESGGGLVQPGGSLRLSCAAS

SEQ ID NO: 2934 - protein, 25 aa, synthetic construct
  REGION 1..25: note = Synthetic
EVQLLESGGGLVQPGGSLRLSCAAS

SEQ ID NO: 2935 - protein, 25 aa, synthetic construct
  REGION 1..25: note = Synthetic
EVQLLESGGGLVQPGGSLRLSCAAS

SEQ ID NO: 2936 - protein, 25 aa, synthetic construct
  REGION 1..25: note = Synthetic
EVQLLESGGGLVQPGGSLRLSCAAS

SEQ ID NO: 2937 - protein, 25 aa, synthetic construct
  REGION 1..25: note = Synthetic
EVQLLESGGGLVQPGGSLRLSCAAS

SEQ ID NO: 2938 - protein, 25 aa, synthetic construct
  REGION 1..25: note = Synthetic
EVQLLESGGGLVQPGGSLRLSCAAS

SEQ ID NO: 2939 - protein, 25 aa, synthetic construct
  REGION 1..25: note = Synthetic
EVQLLESGGGLVQPGGSLRLSCAAS

SEQ ID NO: 2940 - protein, 25 aa, synthetic construct
  REGION 1..25: note = Synthetic
EVQLLESGGGLVQPGGSLRLSCAAS

SEQ ID NO: 2941 - protein, 25 aa, synthetic construct
  REGION 1..25: note = Synthetic
EVQLLESGGGLVQPGGSLRLSCAAS

SEQ ID NO: 2942 - protein, 25 aa, synthetic construct
  REGION 1..25: note = Synthetic
EVQLLESGGGLVQPGGSLRLSCAAS

SEQ ID NO: 2943 - protein, 25 aa, synthetic construct
  REGION 1..25: note = Synthetic
EVQLLESGGGLVQPGGSLRLSCAAS

SEQ ID NO: 2944 - protein, 25 aa, synthetic construct
  REGION 1..25: note = Synthetic
EVQLLESGGGLVQPGGSLRLSCAAS

SEQ ID NO: 2945 - protein, 25 aa, synthetic construct
  REGION 1..25: note = Synthetic
EVQLLESGGGLVQPGGSLRLSCAAS

SEQ ID NO: 2946 - protein, 25 aa, synthetic construct
  REGION 1..25: note = Synthetic
EVQLLESGGGLVQPGGSLRLSCAAS

SEQ ID NO: 2947 - protein, 25 aa, synthetic construct
  REGION 1..25: note = Synthetic
EVQLLESGGGLVQPGGSLRLSCAAS

SEQ ID NO: 2948 - protein, 25 aa, synthetic construct
  REGION 1..25: note = Synthetic
EVQLLESGGGLVQPGGSLRLSCAAS

SEQ ID NO: 2949 - protein, 25 aa, synthetic construct
  REGION 1..25: note = Synthetic
EVQLLESGGGLVQPGGSLRLSCAAS

SEQ ID NO: 2950 - protein, 25 aa, synthetic construct
  REGION 1..25: note = Synthetic
EVQLLESGGGLVQPGGSLRLSCAAS

SEQ ID NO: 2951 - protein, 25 aa, synthetic construct
  REGION 1..25: note = Synthetic
EVQLLESGGGLVQPGGSLRLSCAAS

SEQ ID NO: 2952 - protein, 25 aa, synthetic construct
  REGION 1..25: note = Synthetic
EVQLLESGGGLVQPGGSLRLSCAAS

SEQ ID NO: 2953 - protein, 25 aa, synthetic construct
  REGION 1..25: note = Synthetic
EVQLLESGGGLVQPGGSLRLSCAAS

SEQ ID NO: 2954 - protein, 25 aa, synthetic construct
  REGION 1..25: note = Synthetic
EVQLLESGGGLVQPGGSLRLSCAAS

SEQ ID NO: 2955 - protein, 25 aa, synthetic construct
  REGION 1..25: note = Synthetic
EVQLLESGGGLVQPGGSLRLSCAAS

SEQ ID NO: 2956 - protein, 17 aa, synthetic construct
  REGION 1..17: note = Synthetic
MGWFRQAPGKEREFVSA

SEQ ID NO: 2957 - protein, 17 aa, synthetic construct
  REGION 1..17: note = Synthetic
VGWFRQAPGKEREFVSA

SEQ ID NO: 2958 - protein, 17 aa, synthetic construct
  REGION 1..17: note = Synthetic
MGWFRQAPGKEREFVSA

SEQ ID NO: 2959 - protein, 17 aa, synthetic construct
  REGION 1..17: note = Synthetic
MGWFRQAPGKEREFVSS

SEQ ID NO: 2960 - protein, 17 aa, synthetic construct
  REGION 1..17: note = Synthetic
IGWFRQAPGKERDFVSA

SEQ ID NO: 2961 - protein, 17 aa, synthetic construct
  REGION 1..17: note = Synthetic
MGWFRQAPGKEREFVSA

SEQ ID NO: 2962 - protein, 17 aa, synthetic construct
  REGION 1..17: note = Synthetic
IGWFRQAPGKEREFVSA

SEQ ID NO: 2963 - protein, 17 aa, synthetic construct
  REGION 1..17: note = Synthetic
MGWFRQAPGKEREFVSA

SEQ ID NO: 2964 - protein, 17 aa, synthetic construct
  REGION 1..17: note = Synthetic
IGWFRQAPGKEREFVSA

SEQ ID NO: 2965 - protein, 17 aa, synthetic construct
  REGION 1..17: note = Synthetic
MGWFRQAPGKEREFVSA

SEQ ID NO: 2966 - protein, 17 aa, synthetic construct
  REGION 1..17: note = Synthetic
MWFRQAPGKEREFVSAI

SEQ ID NO: 2967 - protein, 17 aa, synthetic construct
  REGION 1..17: note = Synthetic
MGWFRQAPGKEREFVSA

SEQ ID NO: 2968 - protein, 17 aa, synthetic construct
  REGION 1..17: note = Synthetic
MGWFRQAPGKEREFVSA

SEQ ID NO: 2969 - protein, 17 aa, synthetic construct
  REGION 1..17: note = Synthetic
IGWFRQAPGKEREFVSA

SEQ ID NO: 2970 - protein, 17 aa, synthetic construct
  REGION 1..17: note = Synthetic
MGWFRQAPGKEREFVSG

SEQ ID NO: 2971 - protein, 17 aa, synthetic construct
  REGION 1..17: note = Synthetic
IGWFRQAPGKEREFVSA

SEQ ID NO: 2972 - protein, 17 aa, synthetic construct
  REGION 1..17: note = Synthetic
IGWFRQAPGKEREFVSA

SEQ ID NO: 2973 - protein, 17 aa, synthetic construct
  REGION 1..17: note = Synthetic
IGWFRQAPGKEREFVSA

SEQ ID NO: 2974 - protein, 17 aa, synthetic construct
  REGION 1..17: note = Synthetic
VGWFRQAPGKEREFVSA

SEQ ID NO: 2975 - protein, 17 aa, synthetic construct
  REGION 1..17: note = Synthetic
MAWFRQAPGKEREFVSG

SEQ ID NO: 2976 - protein, 17 aa, synthetic construct
  REGION 1..17: note = Synthetic
IGWFRQAPGKEREFVSA

SEQ ID NO: 2977 - protein, 17 aa, synthetic construct
  REGION 1..17: note = Synthetic
MGWFRQAPGKEREFVSA

SEQ ID NO: 2978 - protein, 17 aa, synthetic construct
  REGION 1..17: note = Synthetic
IGWFRQAPGKEREFVSA

SEQ ID NO: 2979 - protein, 38 aa, synthetic construct
  REGION 1..38: note = Synthetic
YYADSVKGRFTISRDNSKNTLYLQMNSLKPEDTAVYYC

SEQ ID NO: 2980 - protein, 38 aa, synthetic construct
  REGION 1..38: note = Synthetic
YYRDSVKGRFTISRDNSKNTLYLQMNSLKPEDTAVYYC

SEQ ID NO: 2981 - protein, 38 aa, synthetic construct; identical to SEQ ID NO: 2980
  REGION 1..38: note = Synthetic

SEQ ID NO: 2982 - protein, 38 aa, synthetic construct
  REGION 1..38: note = Synthetic
IYADSVKGRFTISRDNSKNTLYLQMNSLKPEDTAVYYC

SEQ ID NO: 2983 - protein, 38 aa, synthetic construct; identical to SEQ ID NO: 2979
  REGION 1..38: note = Synthetic

SEQ ID NO: 2984 - protein, 38 aa, synthetic construct; identical to SEQ ID NO: 2979
  REGION 1..38: note = Synthetic

SEQ ID NO: 2985 - protein, 38 aa, synthetic construct; identical to SEQ ID NO: 2979
  REGION 1..38: note = Synthetic

SEQ ID NO: 2986 - protein, 38 aa, synthetic construct; identical to SEQ ID NO: 2979
  REGION 1..38: note = Synthetic

SEQ ID NO: 2987 - protein, 38 aa, synthetic construct
  REGION 1..38: note = Synthetic
YYSDSVKGRFTISRDNSKNTLYLQMNSLKPEDTAVYYC

SEQ ID NO: 2988 - protein, 38 aa, synthetic construct; identical to SEQ ID NO: 2979
  REGION 1..38: note = Synthetic

SEQ ID NO: 2989 - protein, 38 aa, synthetic construct; identical to SEQ ID NO: 2979
  REGION 1..38: note = Synthetic

SEQ ID NO: 2990 - protein, 38 aa, synthetic construct; identical to SEQ ID NO: 2979
  REGION 1..38: note = Synthetic

SEQ ID NO: 2991 - protein, 38 aa, synthetic construct; identical to SEQ ID NO: 2979
  REGION 1..38: note = Synthetic

SEQ ID NO: 2992 - protein, 38 aa, synthetic construct; identical to SEQ ID NO: 2979
  REGION 1..38: note = Synthetic

SEQ ID NO: 2993 - protein, 38 aa, synthetic construct
  REGION 1..38: note = Synthetic
YYTDSVKGRFTISRDNSKNTLYLQMNSLKPEDTAVYYC

SEQ ID NO: 2994 - protein, 38 aa, synthetic construct; identical to SEQ ID NO: 2979
  REGION 1..38: note = Synthetic

SEQ ID NO: 2995 - protein, 38 aa, synthetic construct
  REGION 1..38: note = Synthetic
HYADSVKGRFTISRDNSKNTLYLQMNSLKPEDTAVYYC

SEQ ID NO: 2996 - protein, 38 aa, synthetic construct
  REGION 1..38: note = Synthetic
VYSDSVKGRFTISRDNSKNTLYLQMNSLKPEDTAVYYC

SEQ ID NO: 2997 - protein, 38 aa, synthetic construct; identical to SEQ ID NO: 2979
  REGION 1..38: note = Synthetic

SEQ ID NO: 2998 - protein, 38 aa, synthetic construct; identical to SEQ ID NO: 2980
  REGION 1..38: note = Synthetic

SEQ ID NO: 2999 - protein, 38 aa, synthetic construct; identical to SEQ ID NO: 2979
  REGION 1..38: note = Synthetic

SEQ ID NO: 3000 - protein, 38 aa, synthetic construct; identical to SEQ ID NO: 2979
  REGION 1..38: note = Synthetic

SEQ ID NO: 3001 - protein, 38 aa, synthetic construct; identical to SEQ ID NO: 2979
  REGION 1..38: note = Synthetic

SEQ ID NO: 3002 - protein, 11 aa, synthetic construct
  REGION 1..11: note = Synthetic
WGQGTQVTVSS

SEQ ID NO: 3003 - protein, 11 aa, synthetic construct
  REGION 1..11: note = Synthetic
WGQGTQVTVSS

SEQ ID NO: 3004 - protein, 11 aa, synthetic construct
  REGION 1..11: note = Synthetic
WGQGTQVTVSS

SEQ ID NO: 3005 - protein, 11 aa, synthetic construct
  REGION 1..11: note = Synthetic
WGQGTQVTVSS

SEQ ID NO: 3006 - protein, 11 aa, synthetic construct
  REGION 1..11: note = Synthetic
WGQGTQVTVSS

SEQ ID NO: 3007 - protein, 11 aa, synthetic construct
  REGION 1..11: note = Synthetic
WGQGTQVTVSS

SEQ ID NO: 3008 - protein, 11 aa, synthetic construct
  REGION 1..11: note = Synthetic
WGQGTQVTVSS

SEQ ID NO: 3009 - protein, 11 aa, synthetic construct
  REGION 1..11: note = Synthetic
WGQGTQVTVSS

SEQ ID NO: 3010 - protein, 11 aa, synthetic construct
  REGION 1..11: note = Synthetic
WGQGTQVTVSS

SEQ ID NO: 3011 - protein, 11 aa, synthetic construct
  REGION 1..11: note = Synthetic
WGQGTQVTVSS

SEQ ID NO: 3012 - protein, 11 aa, synthetic construct
  REGION 1..11: note = Synthetic
WGQGTQVTVSS

SEQ ID NO: 3013 - protein, 11 aa, synthetic construct
  REGION 1..11: note = Synthetic
WGQGTQVTVSS

SEQ ID NO: 3014 - protein, 11 aa, synthetic construct
  REGION 1..11: note = Synthetic
WGQGTQVTVSS

SEQ ID NO: 3015 - protein, 11 aa, synthetic construct
  REGION 1..11: note = Synthetic
WGQGTQVTVSS

SEQ ID NO: 3016 - protein, 11 aa, synthetic construct
  REGION 1..11: note = Synthetic
WGQGTQVTVSS

SEQ ID NO: 3017 - protein, 11 aa, synthetic construct
  REGION 1..11: note = Synthetic
WGQGTQVTVSS

SEQ ID NO: 3018 - protein, 11 aa, synthetic construct
  REGION 1..11: note = Synthetic
WGQGTQVTVSS

SEQ ID NO: 3019 - protein, 11 aa, synthetic construct
  REGION 1..11: note = Synthetic
WGQGTQVTVSS

SEQ ID NO: 3020 - protein, 11 aa, synthetic construct
  REGION 1..11: note = Synthetic
WGQGTQVTVSS

SEQ ID NO: 3021 - protein, 11 aa, synthetic construct
  REGION 1..11: note = Synthetic
WGQGTQVTVSS

SEQ ID NO: 3022 - protein, 11 aa, synthetic construct
  REGION 1..11: note = Synthetic
WGQGTQVTVSS

SEQ ID NO: 3023 - protein, 11 aa, synthetic construct
  REGION 1..11: note = Synthetic
WGQGTQVTVSS

SEQ ID NO: 3024 - protein, 11 aa, synthetic construct
  REGION 1..11: note = Synthetic
WGQGTQVTVSS

SEQ ID NO: 3025 - DNA, 75 bp, synthetic construct
  misc_feature 1..75: note = Synthetic
  source 1..75: mol_type = other DNA
gaggtgcagctgttggagtctgggggaggcttggtacagcctggggggtccctgagactctcctgtgcagcctct

SEQ ID NO: 3026 - DNA, 75 bp, synthetic construct; identical to SEQ ID NO: 3025
  misc_feature 1..75: note = Synthetic
  source 1..75: mol_type = other DNA

SEQ ID NO: 3027 - DNA, 75 bp, synthetic construct; identical to SEQ ID NO: 3025
  misc_feature 1..75: note = Synthetic
  source 1..75: mol_type = other DNA

SEQ ID NO: 3028 - DNA, 75 bp, synthetic construct; identical to SEQ ID NO: 3025
  misc_feature 1..75: note = Synthetic
  source 1..75: mol_type = other DNA

SEQ ID NO: 3029 - DNA, 75 bp, synthetic construct; identical to SEQ ID NO: 3025
  misc_feature 1..75: note = Synthetic
  source 1..75: mol_type = other DNA

SEQ ID NO: 3030 - DNA, 75 bp, synthetic construct; identical to SEQ ID NO: 3025
  misc_feature 1..75: note = Synthetic
  source 1..75: mol_type = other DNA

SEQ ID NO: 3031 - DNA, 75 bp, synthetic construct; identical to SEQ ID NO: 3025
  misc_feature 1..75: note = Synthetic
  source 1..75: mol_type = other DNA

SEQ ID NO: 3032 - DNA, 75 bp, synthetic construct; identical to SEQ ID NO: 3025
  misc_feature 1..75: note = Synthetic
  source 1..75: mol_type = other DNA

SEQ ID NO: 3033 - DNA, 75 bp, synthetic construct; identical to SEQ ID NO: 3025
  misc_feature 1..75: note = Synthetic
  source 1..75: mol_type = other DNA

SEQ ID NO: 3034 - DNA, 75 bp, synthetic construct; identical to SEQ ID NO: 3025
  misc_feature 1..75: note = Synthetic
  source 1..75: mol_type = other DNA

SEQ ID NO: 3035 - DNA, 75 bp, synthetic construct; identical to SEQ ID NO: 3025
  misc_feature 1..75: note = Synthetic
  source 1..75: mol_type = other DNA

SEQ ID NO: 3036 - DNA, 75 bp, synthetic construct; identical to SEQ ID NO: 3025
  misc_feature 1..75: note = Synthetic
  source 1..75: mol_type = other DNA

SEQ ID NO: 3037 - DNA, 75 bp, synthetic construct; identical to SEQ ID NO: 3025
  misc_feature 1..75: note = Synthetic
  source 1..75: mol_type = other DNA

SEQ ID NO: 3038 - DNA, 75 bp, synthetic construct; identical to SEQ ID NO: 3025
  misc_feature 1..75: note = Synthetic
  source 1..75: mol_type = other DNA

SEQ ID NO: 3039 - DNA, 75 bp, synthetic construct; identical to SEQ ID NO: 3025
  misc_feature 1..75: note = Synthetic
  source 1..75: mol_type = other DNA

SEQ ID NO: 3040 - DNA, 75 bp, synthetic construct; identical to SEQ ID NO: 3025
  misc_feature 1..75: note = Synthetic
  source 1..75: mol_type = other DNA

SEQ ID NO: 3041 - DNA, 75 bp, synthetic construct; identical to SEQ ID NO: 3025
  misc_feature 1..75: note = Synthetic
  source 1..75: mol_type = other DNA

SEQ ID NO: 3042 - DNA, 75 bp, synthetic construct; identical to SEQ ID NO: 3025
  misc_feature 1..75: note = Synthetic
  source 1..75: mol_type = other DNA

SEQ ID NO: 3043 - DNA, 75 bp, synthetic construct; identical to SEQ ID NO: 3025
  misc_feature 1..75: note = Synthetic
  source 1..75: mol_type = other DNA

SEQ ID NO: 3044 - DNA, 75 bp, synthetic construct; identical to SEQ ID NO: 3025
  misc_feature 1..75: note = Synthetic
  source 1..75: mol_type = other DNA

SEQ ID NO: 3045 - DNA, 75 bp, synthetic construct; identical to SEQ ID NO: 3025
  misc_feature 1..75: note = Synthetic
  source 1..75: mol_type = other DNA

SEQ ID NO: 3046 - DNA, 75 bp, synthetic construct; identical to SEQ ID NO: 3025
  misc_feature 1..75: note = Synthetic
  source 1..75: mol_type = other DNA

SEQ ID NO: 3047 - DNA, 75 bp, synthetic construct; identical to SEQ ID NO: 3025
  misc_feature 1..75: note = Synthetic
  source 1..75: mol_type = other DNA

SEQ ID NO: 3048 - DNA, 51 bp, synthetic construct
  misc_feature 1..51: note = Synthetic
  source 1..51: mol_type = other DNA
atgggatggttccgccaggctccagggaaggaacgggagttcgtctcagct

SEQ ID NO: 3049 - DNA, 51 bp, synthetic construct
  misc_feature 1..51: note = Synthetic
  source 1..51: mol_type = other DNA
gtgggatggttccgccaggctccagggaaggaaagagagttcgtctcagct

SEQ ID NO: 3050 - DNA, 51 bp, synthetic construct
  misc_feature 1..51: note = Synthetic
  source 1..51: mol_type = other DNA
atggggtggtttcgccaggctccagggaaggaacgggagtttgtctcagcc

SEQ ID NO: 3051 - DNA, 51 bp, synthetic construct
  misc_feature 1..51: note = Synthetic
  source 1..51: mol_type = other DNA
atgggctggttccgccaggctccagggaaggaaagagagttcgtctcatcc

SEQ ID NO: 3052 - DNA, 51 bp, synthetic construct
  misc_feature 1..51: note = Synthetic
  source 1..51: mol_type = other DNA
atcgggtggtttcgccaggctccagggaaggaaagagatttcgtctcagct

SEQ ID NO: 3053 - DNA, 51 bp, synthetic construct
  misc_feature 1..51: note = Synthetic
  source 1..51: mol_type = other DNA
atgggatggttccgccaggctccagggaaggagcgcgagtttgtctcagct

SEQ ID NO: 3054 - DNA, 51 bp, synthetic construct
  misc_feature 1..51: note = Synthetic
  source 1..51: mol_type = other DNA
attgggtggtttcgccaggctccagggaaggagcgcgagtttgtctcagct

SEQ ID NO: 3055 - DNA, 51 bp, synthetic construct
  misc_feature 1..51: note = Synthetic
  source 1..51: mol_type = other DNA
atgggctggtttcgccaggctccagggaaggagcgggagttcgtctcagct

SEQ ID NO: 3056 - DNA, 51 bp, synthetic construct
  misc_feature 1..51: note = Synthetic
  source 1..51: mol_type = other DNA
atcgggtggttccgccaggctccagggaaggaacgagagttcgtctcagcc

SEQ ID NO: 3057 - DNA, 51 bp, synthetic construct
  misc_feature 1..51: note = Synthetic
  source 1..51: mol_type = other DNA
atgggatggttccgccaggctccagggaaggaacgcgagtttgtctcagct

SEQ ID NO: 3058 - DNA, 51 bp, synthetic construct
  misc_feature 1..51: note = Synthetic
  source 1..51: mol_type = other DNA
atgtggtttcgccaggctccagggaaggaacgcgagtttgtctcagctatt

SEQ ID NO: 3059 - DNA, 51 bp, synthetic construct
  misc_feature 1..51: note = Synthetic
  source 1..51: mol_type = other DNA
atgggctggtttcgccaggctccagggaaggagcgagagttcgtctcagcc

SEQ ID NO: 3060 - DNA, 51 bp, synthetic construct
  misc_feature 1..51: note = Synthetic
  source 1..51: mol_type = other DNA
atgggatggtttcgccaggctccagggaaggagcgcgagtttgtctcagct

SEQ ID NO: 3061 - DNA, 51 bp, synthetic construct
  misc_feature 1..51: note = Synthetic
  source 1..51: mol_type = other DNA
atcggatggttccgccaggctccagggaaggagcgggagtttgtctcagct

SEQ ID NO: 3062 - DNA, 51 bp, synthetic construct
  misc_feature 1..51: note = Synthetic
  source 1..51: mol_type = other DNA
atggggtggttccgccaggctccagggaaggaaagggagttcgtcagtggc

SEQ ID NO: 3063 - DNA, 51 bp, synthetic construct
  misc_feature 1..51: note = Synthetic
  source 1..51: mol_type = other DNA
atcggatggttccgccaggctccagggaaggagagggagtttgtctcagct

SEQ ID NO: 3064 - DNA, 51 bp, synthetic construct
  misc_feature 1..51: note = Synthetic
  source 1..51: mol_type = other DNA
atcggatggttccgccaggctccagggaaggagcgggagttcgtctcagct

SEQ ID NO: 3065 - DNA, 51 bp, synthetic construct
  misc_feature 1..51: note = Synthetic
  source 1..51: mol_type = other DNA
atcgggtggtttcgccaggctccagggaaggagagagagtttgtctcagct

SEQ ID NO: 3066 - DNA, 51 bp, synthetic construct
  misc_feature 1..51: note = Synthetic
  source 1..51: mol_type = other DNA
gtgggttggtttcgccaggctccagggaaggagcgggagtttgtctcagct

SEQ ID NO: 3067 - DNA, 51 bp, synthetic construct
  misc_feature 1..51: note = Synthetic
  source 1..51: mol_type = other DNA
atggcatggtttcgccaggctccagggaaggaacgcgagttcgtcagtggg

SEQ ID NO: 3068 - DNA, 51 bp, synthetic construct
  misc_feature 1..51: note = Synthetic
  source 1..51: mol_type = other DNA
atcggctggttccgccaggctccagggaaggagagagagtttgtctcagct

SEQ ID NO: 3069 - DNA, 51 bp, synthetic construct
  misc_feature 1..51: note = Synthetic
  source 1..51: mol_type = other DNA
atgggttggttccgccaggctccagggaaggaaagggagttcgtctcagct

SEQ ID NO: 3070 - DNA, 51 bp, synthetic construct
  misc_feature 1..51: note = Synthetic
  source 1..51: mol_type = other DNA
attggctggttccgccaggctccagggaaggagagagagttcgtctcagca

SEQ ID NO: 3071 - DNA, 114 bp, synthetic construct
  misc_feature 1..114: note = Synthetic
  source 1..114: mol_type = other DNA
tactacgcagactccgtgaagggccggttcaccatctccagagacaattccaagaacacgctgtatctgcaaatgaacagcctgaagcccgaggacacggccgtatattactgt

SEQ ID NO: 3072 - DNA, 114 bp, synthetic construct
  misc_feature 1..114: note = Synthetic
  source 1..114: mol_type = other DNA
tactaccgcgactccgtgaagggccggttcaccatctccagagacaattccaagaacacgctgtatctgcaaatgaacagcctgaaaccagaggacacggccgtatattactgt

SEQ ID NO: 3073 - DNA, 114 bp, synthetic construct
  misc_feature 1..114: note = Synthetic
  source 1..114: mol_type = other DNA
tactacagagactccgtgaagggccggttcaccatctccagagacaattccaagaacacgctgtatctgcaaatgaacagcctgaaaccagaggacacggccgtatattactgt

SEQ ID NO: 3074 - DNA, 114 bp, synthetic construct
  misc_feature 1..114: note = Synthetic
  source 1..114: mol_type = other DNA
atttatgcagactccgtgaagggccggttcaccatctccagagataattccaagaacacgctgtatctgcaaatgaacagcctgaagccagaggacacggccgtatattactgt

SEQ ID NO: 3075 - DNA, 114 bp, synthetic construct
  misc_feature 1..114: note = Synthetic
  source 1..114: mol_type = other DNA
tactacgcagactccgtgaagggccggttcaccatctccagagacaattccaagaacacgctgtatctgcaaatgaacagcctgaaaccggaggacacggccgtatattactgt

SEQ ID NO: 3076 - DNA, 114 bp, synthetic construct
  misc_feature 1..114: note = Synthetic
  source 1..114: mol_type = other DNA
tactacgcagactccgtgaagggccggttcaccatctccagagacaattccaagaacacgctgtatctgcaaatgaacagcctgaagcctgaggacacggccgtatattactgt

SEQ ID NO: 3077 - DNA, 114 bp, synthetic construct
  misc_feature 1..114: note = Synthetic
  source 1..114: mol_type = other DNA
tactatgcagactccgtgaagggccggttcaccatctccagagacaattccaagaacacgctgtatctgcaaatgaacagcctgaaaccggaggacacggccgtatattactgt

SEQ ID NO: 3078 - DNA, 114 bp, synthetic construct
  misc_feature 1..114: note = Synthetic
  source 1..114: mol_type = other DNA
tactatgcagactccgtgaagggccggttcaccatctccagagacaattccaagaacacgctgtatctgcaaatgaacagcctgaaacctgaggacacggccgtatattactgt

SEQ ID NO: 3079 - DNA, 114 bp, synthetic construct
  misc_feature 1..114: note = Synthetic
  source 1..114: mol_type = other DNA
tactattccgactccgtgaagggccggttcaccatctccagagataattccaagaacacgctgtatctgcaaatgaacagcctgaagccagaggacacggccgtatattactgt

SEQ ID NO: 3080 - DNA, 114 bp, synthetic construct
  misc_feature 1..114: note = Synthetic
  source 1..114: mol_type = other DNA
tactatgcagactccgtgaagggccggttcaccatctccagagacaattccaagaacacgctgtatctgcaaatgaacagcctgaaacccgaggacacggccgtatattactgt

SEQ ID NO: 3081 - DNA, 114 bp, synthetic construct
  misc_feature 1..114: note = Synthetic
  source 1..114: mol_type = other DNA
tactacgcagactccgtgaagggccggttcaccatctccagagacaattccaagaacacgctgtatctgcaaatgaacagcctgaaacccgaggacacggccgtatattactgt

SEQ ID NO: 3082 - DNA, 114 bp, synthetic construct
  misc_feature 1..114: note = Synthetic
  source 1..114: mol_type = other DNA
tactatgcagactccgtgaagggccggttcaccatctccagagataattccaagaacacgctgtatctgcaaatgaacagcctgaaaccggaggacacggccgtatattactgt

SEQ ID NO: 3083 - DNA, 114 bp, synthetic construct
  misc_feature 1..114: note = Synthetic
  source 1..114: mol_type = other DNA
tactacgcagactccgtgaagggccggttcaccatctccagagacaattccaagaacacgctgtatctgcaaatgaacagcctgaagccagaggacacggccgtatattactgt

SEQ ID NO: 3084 - DNA, 114 bp, synthetic construct
  misc_feature 1..114: note = Synthetic
  source 1..114: mol_type = other DNA
tactatgcagactccgtgaagggccggttcaccatctccagagacaattccaagaacacgctgtatctgcaaatgaacagcctgaaaccagaggacacggccgtatattactgt

SEQ ID NO: 3085 - DNA, 114 bp, synthetic construct
  misc_feature 1..114: note = Synthetic
  source 1..114: mol_type = other DNA
tactatactgactccgtgaagggccggttcaccatctccagagataattccaagaacacgctgtatctgcaaatgaacagcctgaaacccgaggacacggccgtatattactgt

SEQ ID NO: 3086 - DNA, 114 bp, synthetic construct; identical to SEQ ID NO: 3075
  misc_feature 1..114: note = Synthetic
  source 1..114: mol_type = other DNA

SEQ ID NO: 3087 - DNA, 114 bp, synthetic construct
  misc_feature 1..114: note = Synthetic
  source 1..114: mol_type = other DNA
cactacgcagactccgtgaagggccggttcaccatctccagagacaattccaagaacacgctgtatctgcaaatgaacagcctgaaaccggaggacacggccgtatattactgt

SEQ ID NO: 3088 - DNA, 114 bp, synthetic construct
  misc_feature 1..114: note = Synthetic
  source 1..114: mol_type = other DNA
gtgtactcagactccgtgaagggccggttcaccatctccagagacaattccaagaacacgctgtatctgcaaatgaacagcctgaaacccgaggacacggccgtatattactgt

SEQ ID NO: 3089 - DNA, 114 bp, synthetic construct; identical to SEQ ID NO: 3076
  misc_feature 1..114: note = Synthetic
  source 1..114: mol_type = other DNA

SEQ ID NO: 3090 - DNA, 114 bp, synthetic construct
  misc_feature 1..114: note = Synthetic
  source 1..114: mol_type = other DNA
tactatagggactccgtgaagggccggttcaccatctccagagataattccaagaacacgctgtatctgcaaatgaacagcctgaaacctgaggacacggccgtatattactgt

SEQ ID NO: 3091 - DNA, 114 bp, synthetic construct
  misc_feature 1..114: note = Synthetic
  source 1..114: mol_type = other DNA
tactacgcagactccgtgaagggccggttcaccatctccagagacaattccaagaacacgctgtatctgcaaatgaacagcctgaaaccagaggacacggccgtatattactgt

SEQ ID NO: 3092 - DNA, 114 bp, synthetic construct; identical to SEQ ID NO: 3083
  misc_feature 1..114: note = Synthetic
  source 1..114: mol_type = other DNA

SEQ ID NO: 3093 - DNA, 114 bp, synthetic construct; identical to SEQ ID NO: 3076
  misc_feature 1..114: note = Synthetic
  source 1..114: mol_type = other DNA

SEQ ID NO: 3094 - DNA, 33 bp, synthetic construct
  misc_feature 1..33: note = Synthetic
  source 1..33: mol_type = other DNA
tggggccaagggacccaggtcaccgtctcctca

SEQ ID NO: 3095 - DNA, 33 bp, synthetic construct; identical to SEQ ID NO: 3094
  misc_feature 1..33: note = Synthetic
  source 1..33: mol_type = other DNA

SEQ ID NO: 3096 - DNA, 33 bp, synthetic construct
  misc_feature 1..33: note = Synthetic
  source 1..33: mol_type = other DNA
tggggccaagggacccaagtcaccgtctcctca

SEQ ID NO: 3097 - DNA, 33 bp, synthetic construct; identical to SEQ ID NO: 3094
  misc_feature 1..33: note = Synthetic
  source 1..33: mol_type = other DNA

SEQ ID NO: 3098 - DNA, 33 bp, synthetic construct; identical to SEQ ID NO: 3096
  misc_feature 1..33: note = Synthetic
  source 1..33: mol_type = other DNA

SEQ ID NO: 3099 - DNA, 33 bp, synthetic construct; identical to SEQ ID NO: 3094
  misc_feature 1..33: note = Synthetic
  source 1..33: mol_type = other DNA

SEQ ID NO: 3100 - DNA, 33 bp, synthetic construct; identical to SEQ ID NO: 3094
  misc_feature 1..33: note = Synthetic
  source 1..33: mol_type = other DNA

SEQ ID NO: 3101 - DNA, 33 bp, synthetic construct; identical to SEQ ID NO: 3094
  misc_feature 1..33: note = Synthetic
  source 1..33: mol_type = other DNA

SEQ ID NO: 3102 - DNA, 33 bp, synthetic construct; identical to SEQ ID NO: 3096
  misc_feature 1..33: note = Synthetic
  source 1..33: mol_type = other DNA

SEQ ID NO: 3103 - DNA, 33 bp, synthetic construct; identical to SEQ ID NO: 3094
  misc_feature 1..33: note = Synthetic
  source 1..33: mol_type = other DNA

SEQ ID NO: 3104 - DNA, 33 bp, synthetic construct; identical to SEQ ID NO: 3094
  misc_feature 1..33: note = Synthetic
  source 1..33: mol_type = other DNA

SEQ ID NO: 3105 - DNA, 33 bp, synthetic construct; identical to SEQ ID NO: 3094
  misc_feature 1..33: note = Synthetic
  source 1..33: mol_type = other DNA

SEQ ID NO: 3106 - DNA, 33 bp, synthetic construct; identical to SEQ ID NO: 3096
  misc_feature 1..33: note = Synthetic
  source 1..33: mol_type = other DNA

SEQ ID NO: 3107 - DNA, 33 bp, synthetic construct; identical to SEQ ID NO: 3096
  misc_feature 1..33: note = Synthetic
  source 1..33: mol_type = other DNA

SEQ ID NO: 3108 - DNA, 33 bp, synthetic construct; identical to SEQ ID NO: 3094
  misc_feature 1..33: note = Synthetic
  source 1..33: mol_type = other DNA

SEQ ID NO: 3109 - DNA, 33 bp, synthetic construct; identical to SEQ ID NO: 3096
  misc_feature 1..33: note = Synthetic
  source 1..33: mol_type = other DNA

SEQ ID NO: 3110 - DNA, 33 bp, synthetic construct; identical to SEQ ID NO: 3094
  misc_feature 1..33: note = Synthetic
  source 1..33: mol_type = other DNA

SEQ ID NO: 3111 - DNA, 33 bp, synthetic construct; identical to SEQ ID NO: 3094
  misc_feature 1..33: note = Synthetic
  source 1..33: mol_type = other DNA

SEQ ID NO: 3112 - DNA, 33 bp, synthetic construct; identical to SEQ ID NO: 3094
  misc_feature 1..33: note = Synthetic
  source 1..33: mol_type = other DNA

SEQ ID NO: 3113 - DNA, 33 bp, synthetic construct; identical to SEQ ID NO: 3094
  misc_feature 1..33: note = Synthetic
  source 1..33: mol_type = other DNA

SEQ ID NO: 3114 - DNA, 33 bp, synthetic construct; identical to SEQ ID NO: 3094
  misc_feature 1..33: note = Synthetic
  source 1..33: mol_type = other DNA

SEQ ID NO: 3115 - DNA, 33 bp, synthetic construct; identical to SEQ ID NO: 3094
  misc_feature 1..33: note = Synthetic
  source 1..33: mol_type = other DNA

SEQ ID NO: 3116 - DNA, 33 bp, synthetic construct; identical to SEQ ID NO: 3094
  misc_feature 1..33: note = Synthetic
  source 1..33: mol_type = other DNA

SEQ ID NO: 3117 - protein, 8 aa, synthetic construct
  REGION 1..8: note = Synthetic
GRGFTSYY

SEQ ID NO: 3118 - protein, 8 aa, synthetic construct
  REGION 1..8: note = Synthetic
GLTFSIHT

SEQ ID NO: 3119 - protein, 8 aa, synthetic construct
  REGION 1..8: note = Synthetic
GRIFSSYF

SEQ ID NO: 3120 - protein, 8 aa, synthetic construct
  REGION 1..8: note = Synthetic
GSIVSSYA

SEQ ID NO: 3121 - protein, 8 aa, synthetic construct
  REGION 1..8: note = Synthetic
GSLFQVEH

SEQ ID NO: 3122 - protein, 8 aa, synthetic construct
  REGION 1..8: note = Synthetic
GTTFASSF

SEQ ID NO: 3123 - protein, 8 aa, synthetic construct
  REGION 1..8: note = Synthetic
GSVFSSFT

SEQ ID NO: 3124 - protein, 8 aa, synthetic construct
  REGION 1..8: note = Synthetic
GSIFGSHF

SEQ ID NO: 3125 - protein, 8 aa, synthetic construct
  REGION 1..8: note = Synthetic
GSIFSILD

SEQ ID NO: 3126 - protein, 8 aa, synthetic construct
  REGION 1..8: note = Synthetic
GSTTSSYF

SEQ ID NO: 3127 - protein, 8 aa, synthetic construct
  REGION 1..8: note = Synthetic
GSVFSSYS

SEQ ID NO: 3128 - protein, 8 aa, synthetic construct
  REGION 1..8: note = Synthetic
GSLLSIYD

SEQ ID NO: 3129 - protein, 8 aa, synthetic construct
  REGION 1..8: note = Synthetic
GIGLSIYF

SEQ ID NO: 3130 - protein, 8 aa, synthetic construct
  REGION 1..8: note = Synthetic
GSIFSSSF

SEQ ID NO: 3131 - protein, 8 aa, synthetic construct
  REGION 1..8: note = Synthetic
GRVFSFYF

SEQ ID NO: 3132 - protein, 8 aa, synthetic construct
  REGION 1..8: note = Synthetic
GSLFEVEH

SEQ ID NO: 3133 - protein, 8 aa, synthetic construct
  REGION 1..8: note = Synthetic
GRIFGEYF

SEQ ID NO: 3134 - protein, 8 aa, synthetic construct
  REGION 1..8: note = Synthetic
GSIESIYF

SEQ ID NO: 3135 - protein, 8 aa, synthetic construct
  REGION 1..8: note = Synthetic
GIEVSSSV

SEQ ID NO: 3136 - protein, 8 aa, synthetic construct
  REGION 1..8: note = Synthetic
GFTISRYA

SEQ ID NO: 3137 - protein, 8 aa, synthetic construct
  REGION 1..8: note = Synthetic
GSLFSVEH

SEQ ID NO: 3138 - protein, 8 aa, synthetic construct
  REGION 1..8: note = Synthetic
GFIFSIYD

SEQ ID NO: 3139 - protein, 8 aa, synthetic construct
  REGION 1..8: note = Synthetic
GSVFSSYF

SEQ ID NO: 3140 - protein, 8 aa, synthetic construct
  REGION 1..8: note = Synthetic
VIFPEGYR

SEQ ID NO: 3141 - protein, 8 aa, synthetic construct
  REGION 1..8: note = Synthetic
ALGSGGRP

SEQ ID NO: 3142 - protein, 8 aa, synthetic construct
  REGION 1..8: note = Synthetic
HISSEGST

SEQ ID NO: 3143 - protein, 8 aa, synthetic construct
  REGION 1..8: note = Synthetic
AIGKGGVT

SEQ ID NO: 3144 - protein, 8 aa, synthetic construct
  REGION 1..8: note = Synthetic
QVTGGGYT

SEQ ID NO: 3145 - protein, 8 aa, synthetic construct
  REGION 1..8: note = Synthetic
IVFPGGST

SEQ ID NO: 3146 - protein, 8 aa, synthetic construct
  REGION 1..8: note = Synthetic
IVTSTGST

SEQ ID NO: 3147 - protein, 8 aa, synthetic construct
  REGION 1..8: note = Synthetic
AVTSGGST

SEQ ID NO: 3148 - protein, 8 aa, synthetic construct
  REGION 1..8: note = Synthetic
YISSGGST

SEQ ID NO: 3149 - protein, 8 aa, synthetic construct
  REGION 1..8: note = Synthetic
IITSSGSP

SEQ ID NO: 3150 - protein, 7 aa, synthetic construct
  REGION 1..7: note = Synthetic
ITSGGST

SEQ ID NO: 3151 - protein, 8 aa, synthetic construct
  REGION 1..8: note = Synthetic
RIGKGGST

SEQ ID NO: 3152 - protein, 8 aa, synthetic construct
  REGION 1..8: note = Synthetic
IISSSGST

SEQ ID NO: 3153 - protein, 8 aa, synthetic construct
  REGION 1..8: note = Synthetic
VIASSGST

SEQ ID NO: 3154 - protein, 8 aa, synthetic construct
  REGION 1..8: note = Synthetic
VIGKTGST

SEQ ID NO: 3155 - protein, 8 aa, synthetic construct
  REGION 1..8: note = Synthetic
QVTGGGYT

SEQ ID NO: 3156 - protein, 8 aa, synthetic construct
  REGION 1..8: note = Synthetic
IITGSGIT

SEQ ID NO: 3157 - protein, 8 aa, synthetic construct
  REGION 1..8: note = Synthetic
EFIPGGST

SEQ ID NO: 3158 - protein, 7 aa, synthetic construct
  REGION 1..7: note = Synthetic
SGVGGST

SEQ ID NO: 3159 - protein, 8 aa, synthetic construct
  REGION 1..8: note = Synthetic
SIFVGGGT

SEQ ID NO: 3160 - protein, 8 aa, synthetic construct
  REGION 1..8: note = Synthetic
QVTGGGYT

SEQ ID NO: 3161 - protein, 8 aa, synthetic construct
  REGION 1..8: note = Synthetic
ISTTGGSI

SEQ ID NO: 3162 - protein, 8 aa, synthetic construct
  REGION 1..8: note = Synthetic
VISSSGST

SEQ ID NO: 3163 - protein, 13 aa, synthetic construct
  REGION 1..13: note = Synthetic
AKYTGFGEDAYRY

SEQ ID NO: 3164 - protein, 12 aa, synthetic construct
  REGION 1..12: note = Synthetic
YVDVGTGLYYGY

SEQ ID NO: 3165 - protein, 15 aa, synthetic construct
  REGION 1..15: note = Synthetic
AAREYADTQRGEYAY

SEQ ID NO: 3166 - protein, 10 aa, synthetic construct
  REGION 1..10: note = Synthetic
ATDESTYRDY

SEQ ID NO: 3167 - protein, 9 aa, synthetic construct
  REGION 1..9: note = Synthetic
YVRLVEEAY

SEQ ID NO: 3168 - protein, 15 aa, synthetic construct
  REGION 1..15: note = Synthetic
AARRYELVDRLEYAY

SEQ ID NO: 3169 - protein, 10 aa, synthetic construct
  REGION 1..10: note = Synthetic
NVRTQEDYYY

SEQ ID NO: 3170 - protein, 15 aa, synthetic construct
  REGION 1..15: note = Synthetic
AARTYQSTYQPEYAY

SEQ ID NO: 3171 - protein, 17 aa, synthetic construct
  REGION 1..17: note = Synthetic
VATIFGDRTEGQERYAF

SEQ ID NO: 3172 - protein, 15 aa, synthetic construct
  REGION 1..15: note = Synthetic
AARRYGSRETDDYGY

SEQ ID NO: 3173 - protein, 17 aa, synthetic construct
  REGION 1..17: note = Synthetic
VAVYGIGTGQYIGTYDI

SEQ ID NO: 3174 - protein, 14 aa, synthetic construct
  REGION 1..14: note = Synthetic
AVLVGEGESYGYHY

SEQ ID NO: 3175 - protein, 16 aa, synthetic construct
  REGION 1..16: note = Synthetic
AARTGYSEYEQEDYGY

SEQ ID NO: 3176 - protein, 15 aa, synthetic construct
  REGION 1..15: note = Synthetic
AGRFGQGGGTVEYGY

SEQ ID NO: 3177 - protein, 15 aa, synthetic construct
  REGION 1..15: note = Synthetic
AASEYQGTGYGEFAY

SEQ ID NO: 3178 - protein, 9 aa, synthetic construct
  REGION 1..9: note = Synthetic
YVRLVEEAY

SEQ ID NO: 3179 - protein, 17 aa, synthetic construct
  REGION 1..17: note = Synthetic
AARTDYTTGQELPEYGY

SEQ ID NO: 3180 - protein, 12 aa, synthetic construct
  REGION 1..12: note = Synthetic
NAGLDEGRYYTY

SEQ ID NO: 3181 - protein, 10 aa, synthetic construct
  REGION 1..10: note = Synthetic
YAVYLTIYTY

SEQ ID NO: 3182 - protein, 10 aa, synthetic construct
  REGION 1..10: note = Synthetic
YATVGDSYYY

SEQ ID NO: 3183 - protein, 9 aa, synthetic construct
  REGION 1..9: note = Synthetic
YVRLVEEAY

SEQ ID NO: 3184 - protein, 10 aa, synthetic construct
  REGION 1..10: note = Synthetic
NADPLESYGY

SEQ ID NO: 3185 - protein, 12 aa, synthetic construct
  REGION 1..12: note = Synthetic
VAREDVGEPYGY

SEQ ID NO: 3186 - DNA, 24 bp, synthetic construct
  misc_feature 1..24: note = Synthetic
  source 1..24: mol_type = other DNA
ggaaggggctttacaagctattac

SEQ ID NO: 3187 - DNA, 24 bp, synthetic construct
  misc_feature 1..24: note = Synthetic
  source 1..24: mol_type = other DNA
ggactcacctttagcatacatact

SEQ ID NO: 3188 - DNA, 24 bp, synthetic construct
  misc_feature 1..24: note = Synthetic
  source 1..24: mol_type = other DNA
ggaaggatctttagcagctatttt

SEQ ID NO: 3189 - DNA, 24 bp, synthetic construct
  misc_feature 1..24: note = Synthetic
  source 1..24: mol_type = other DNA
ggatctatagtcagcagctatgcc

SEQ ID NO: 3190 - DNA, 24 bp, synthetic construct
  misc_feature 1..24: note = Synthetic
  source 1..24: mol_type = other DNA
ggatcactatttcaggtggagcac

SEQ ID NO: 3191 - DNA, 24 bp, synthetic construct
  misc_feature 1..24: note = Synthetic
  source 1..24: mol_type = other DNA
ggaacaacctttgccagctctttc

SEQ ID NO: 3192 - DNA, 24 bp, synthetic construct
  misc_feature 1..24: note = Synthetic
  source 1..24: mol_type = other DNA
ggaagcgtgtttagcagctttact

SEQ ID NO: 3193 - DNA, 24 bp, synthetic construct
  misc_feature 1..24: note = Synthetic
  source 1..24: mol_type = other DNA
ggaagcatttttggcagccacttc

SEQ ID NO: 3194 - DNA, 24 bp, synthetic construct
  misc_feature 1..24: note = Synthetic
  source 1..24: mol_type = other DNA
ggatctatctttagcatcctggac

SEQ ID NO: 3195 - DNA, 24 bp, synthetic construct
  misc_feature 1..24: note = Synthetic
  source 1..24: mol_type = other DNA
ggaagcaccacgagcagctatttt

SEQ ID NO: 3196 - DNA, 24 bp, synthetic construct
  misc_feature 1..24: note = Synthetic
  source 1..24: mol_type = other DNA
ggatctgtctttagcagctatagc

SEQ ID NO: 3197 - DNA, 24 bp, synthetic construct
  misc_feature 1..24: note = Synthetic
  source 1..24: mol_type = other DNA
ggatccctactgagcatttatgat

SEQ ID NO: 3198 - DNA, 24 bp, synthetic construct
  misc_feature 1..24: note = Synthetic
  source 1..24: mol_type = other DNA
ggaattggcctgagcatatatttc

SEQ ID NO: 3199 - DNA, 24 bp, synthetic construct
  misc_feature 1..24: note = Synthetic
  source 1..24: mol_type = other DNA
ggaagcatttttagcagctccttc

SEQ ID NO: 3200 - DNA, 24 bp, synthetic construct
  misc_feature 1..24: note = Synthetic
  source 1..24: mol_type = other DNA
ggacgagtgtttagcttctatttt

SEQ ID NO: 3201 - DNA, 24 bp, synthetic construct
  misc_feature 1..24: note = Synthetic
  source 1..24: mol_type = other DNA
ggaagtttgtttgaagtcgaacac

SEQ ID NO: 3202 - DNA, 24 bp, synthetic construct
  misc_feature 1..24: note = Synthetic
  source 1..24: mol_type = other DNA
ggacggatttttggagagtatttt

SEQ ID NO: 3203 - DNA, 24 bp, synthetic construct
  misc_feature 1..24: note = Synthetic
  source 1..24: mol_type = other DNA
ggatcaattgagagcatttatttc

SEQ ID NO: 3204 - DNA, 24 bp, synthetic construct
  misc_feature 1..24: note = Synthetic
  source 1..24: mol_type = other DNA
ggaatagaggtcagcagcagtgta

SEQ ID NO: 3205 - DNA, 24 bp, synthetic construct
  misc_feature 1..24: note = Synthetic
  source 1..24: mol_type = other DNA
ggattcaccatcagcagatatgcc

SEQ ID NO: 3206 - DNA, 24 bp, synthetic construct
  misc_feature 1..24: note = Synthetic
  source 1..24: mol_type = other DNA
ggaagcctgtttagcgttgagcac

SEQ ID NO: 3207 - DNA, 24 bp, synthetic construct
  misc_feature 1..24: note = Synthetic
  source 1..24: mol_type = other DNA
ggattcatctttagcatttatgat

SEQ ID NO: 3208 - DNA, 24 bp, synthetic construct
  misc_feature 1..24: note = Synthetic
  source 1..24: mol_type = other DNA
ggatccgtatttagcagctatttc

SEQ ID NO: 3209 - DNA, 24 bp, synthetic construct
  misc_feature 1..24: note = Synthetic
  source 1..24: mol_type = other DNA
gtgattttcccggagggttaccgc

SEQ ID NO: 3210 - DNA, 24 bp, synthetic construct
  misc_feature 1..24: note = Synthetic
  source 1..24: mol_type = other DNA
gcactgggtagtgggggtcgacct

SEQ ID NO: 3211 - DNA, 24 bp, synthetic construct
  misc_feature 1..24: note = Synthetic
  source 1..24: mol_type = other DNA
catattagtagcgaaggtagcaca

SEQ ID NO: 3212 - DNA, 24 bp, synthetic construct
  misc_feature 1..24: note = Synthetic
  source 1..24: mol_type = other DNA
gctattggaaagggtggtgtaaca

SEQ ID NO: 3213 - DNA, 24 bp, synthetic construct
  misc_feature 1..24: note = Synthetic
  source 1..24: mol_type = other DNA
caagtcaccggtggcggttataca

SEQ ID NO: 3214 - DNA, 24 bp, synthetic construct
  misc_feature 1..24: note = Synthetic
  source 1..24: mol_type = other DNA
attgtttttccggggggtagcaca

SEQ ID NO: 3215 - DNA, 24 bp, synthetic construct
  misc_feature 1..24: note = Synthetic
  source 1..24: mol_type = other DNA
attgtcactagcaccggtagtaca

SEQ ID NO: 3216 - DNA, 24 bp, synthetic construct
  misc_feature 1..24: note = Synthetic
  source 1..24: mol_type = other DNA
gcggttaccagcggaggtagtaca

SEQ ID NO: 3217 - DNA, 24 bp, synthetic construct
  misc_feature 1..24: note = Synthetic
  source 1..24: mol_type = other DNA
tatattagcagcggtggtagtaca

SEQ ID NO: 3218 - DNA, 24 bp, synthetic construct
  misc_feature 1..24: note = Synthetic
  source 1..24: mol_type = other DNA
attataactagcagtggtagtccc

SEQ ID NO: 3219 - DNA, 21 bp, synthetic construct
  misc_feature 1..21: note = Synthetic
  source 1..21: mol_type = other DNA
atcactagtggcggtagcaca

SEQ ID NO: 3220 - DNA, 24 bp, synthetic construct
  misc_feature 1..24: note = Synthetic
  source 1..24: mol_type = other DNA
cgtattggcaaaggtggtagtaca

SEQ ID NO: 3221 - DNA, 24 bp, synthetic construct
  misc_feature 1..24: note = Synthetic
  source 1..24: mol_type = other DNA
attattagttctagtggtagcaca

SEQ ID NO: 3222 - DNA, 24 bp, synthetic construct
  misc_feature 1..24: note = Synthetic
  source 1..24: mol_type = other DNA
gtcattgctagcagtggtagtaca

SEQ ID NO: 3223 - DNA, 24 bp, synthetic construct
  misc_feature 1..24: note = Synthetic
  source 1..24: mol_type = other DNA
gttattggcaaaaccggtagtaca

SEQ ID NO: 3224 - DNA, 24 bp, synthetic construct
  misc_feature 1..24: note = Synthetic
  source 1..24: mol_type = other DNA
caagtgaccggtggcggttataca

SEQ ID NO: 3225 - DNA, 24 bp, synthetic construct
  misc_feature 1..24: note = Synthetic
  source 1..24: mol_type = other DNA
attatcaccggcagtggtattaca

SEQ ID NO: 3226 - DNA, 24 bp, synthetic construct
  misc_feature 1..24: note = Synthetic
  source 1..24: mol_type = other DNA
gaattcatcccaggaggtagcaca

SEQ ID NO: 3227 - DNA, 21 bp, synthetic construct
  misc_feature 1..21: note = Synthetic
  source 1..21: mol_type = other DNA
agcggtgtgggaggtagcaca

SEQ ID NO: 3228 - DNA, 24 bp, synthetic construct
  misc_feature 1..24: note = Synthetic
  source 1..24: mol_type = other DNA
agcattttcgttggtggtggcaca

SEQ ID NO: 3229 - DNA, 24 bp, synthetic construct
  misc_feature 1..24: note = Synthetic
  source 1..24: mol_type = other DNA
caggtaaccggtgggggttataca

SEQ ID NO: 3230 - DNA, 24 bp, synthetic construct
  misc_feature 1..24: note = Synthetic
  source 1..24: mol_type = other DNA
attagtactaccggtggaagcatt

SEQ ID NO: 3231 - DNA, 24 bp, synthetic construct
  misc_feature 1..24: note = Synthetic
  source 1..24: mol_type = other DNA
gtgattagtagcagtggtagcaca

SEQ ID NO: 3232 - DNA, 39 bp, synthetic construct
  misc_feature 1..39: note = Synthetic
  source 1..39: mol_type = other DNA
gcgaaatacacaggtttcggtgaggacgcctatcgctac

SEQ ID NO: 3233 - DNA, 36 bp, synthetic construct
  misc_feature 1..36: note = Synthetic
  source 1..36: mol_type = other DNA
tatgttgacgtggggacagggctgtactatggctac

SEQ ID NO: 3234 - DNA, 45 bp, synthetic construct
  misc_feature 1..45: note = Synthetic
  source 1..45: mol_type = other DNA
gcggcccgcgagtacgcggatacacagcgcggcgagtacgcttac

SEQ ID NO: 3235 - DNA, 30 bp, synthetic construct
  misc_feature 1..30: note = Synthetic
  source 1..30: mol_type = other DNA
gcgacagatgagtctacttaccgtgactac

SEQ ID NO: 3236 - DNA, 27 bp, synthetic construct
  misc_feature 1..27: note = Synthetic
  source 1..27: mol_type = other DNA
tacgtacggctcgtggaagaagcatac

SEQ ID NO: 3237 - DNA, 45 bp, synthetic construct
  misc_feature 1..45: note = Synthetic
  source 1..45: mol_type = other DNA
gcggctagaagatatgagttggtggacaggctggagtacgcctac

SEQ ID NO: 3238 - DNA, 30 bp, synthetic construct
  misc_feature 1..30: note = Synthetic
  source 1..30: mol_type = other DNA
aatgtgaggacacaggaggactattactac

SEQ ID NO: 3239 - DNA, 45 bp, synthetic construct
  misc_feature 1..45: note = Synthetic
  source 1..45: mol_type = other DNA
gcggctcgaacctaccagtcaacgtatcagcctgaatatgcctac

SEQ ID NO: 3240 - DNA, 51 bp, synthetic construct
  misc_feature 1..51: note = Synthetic
  source 1..51: mol_type = other DNA
gtggctaccatctttggtgatcgtaccgagggccaggaaaggtacgctttc

SEQ ID NO: 3241 - DNA, 45 bp, synthetic construct
  misc_feature 1..45: note = Synthetic
  source 1..45: mol_type = other DNA
gcggcgcgtcggtatgggtcgagggaaacggacgactatgggtac

SEQ ID NO: 3242 - DNA, 51 bp, synthetic construct
  misc_feature 1..51: note = Synthetic
  source 1..51: mol_type = other DNA
gtggccgtttacggcataggaactggacaatacatcggtacatatgacatc

SEQ ID NO: 3243 - DNA, 42 bp, synthetic construct
  misc_feature 1..42: note = Synthetic
  source 1..42: mol_type = other DNA
gcggttctggttggtgagggtgaatcttacggctatcactac

SEQ ID NO: 3244 - DNA, 48 bp, synthetic construct
  misc_feature 1..48: note = Synthetic
  source 1..48: mol_type = other DNA
gcggctcgaaccggctactctgaatacgagcaggaagactatggctac

SEQ ID NO: 3245 - DNA, 45 bp, synthetic construct
  misc_feature 1..45: note = Synthetic
  source 1..45: mol_type = other DNA
gcgggccggttcgggcaggggggggggaccgtggaatatggctac

SEQ ID NO: 3246 - DNA, 45 bp, synthetic construct
  misc_feature 1..45: note = Synthetic
  source 1..45: mol_type = other DNA
gcggccagtgaataccaaggtaccgggtacggagaatttgcatac

SEQ ID NO: 3247 - DNA, 27 bp, synthetic construct
  misc_feature 1..27: note = Synthetic
  source 1..27: mol_type = other DNA
tacgtccggcttgtggaggaagcctac

SEQ ID NO: 3248 - DNA, 51 bp, synthetic construct
  misc_feature 1..51: note = Synthetic
  source 1..51: mol_type = other DNA
gcggcgcgcacagactacactacaggccaggaactaccagaatacgggtac

SEQ ID NO: 3249 - DNA, 36 bp, synthetic construct
  misc_feature 1..36: note = Synthetic
  source 1..36: mol_type = other DNA
aacgccggcctagacgaagggcggtactacacctac

SEQ ID NO: 3250 - DNA, 30 bp, synthetic construct
  misc_feature 1..30: note = Synthetic
  source 1..30: mol_type = other DNA
tatgcagtgtacttgaccatctacacctac

SEQ ID NO: 3251 - DNA, 30 bp, synthetic construct
  misc_feature 1..30: note = Synthetic
  source 1..30: mol_type = other DNA
tatgccaccgtgggtgactcctattattac

SEQ ID NO: 3252 - DNA, 27 bp, synthetic construct
  misc_feature 1..27: note = Synthetic
  source 1..27: mol_type = other DNA
tatgttagacttgtggaggaagcttac

SEQ ID NO: 3253 - DNA, 30 bp, synthetic construct
  misc_feature 1..30: note = Synthetic
  source 1..30: mol_type = other DNA
aacgccgaccctttagaaagctacgggtac

SEQ ID NO: 3254 - DNA, 36 bp, synthetic construct
  misc_feature 1..36: note = Synthetic
  source 1..36: mol_type = other DNA
gttgcacgggaggatgttggcgagccctacggctac

SEQ ID NO: 3255 - protein, 120 aa, synthetic construct
  REGION 1..120: note = Synthetic
EVQLLESGGGLVQPGGSLRLSCAASGRGFTSYYMGWFRQAPGKEREFVSAVIFPEGYRYYADSVKGRFTISRDNSKNTLYLQMNSLKPEDTAVYYCAKYTGFGEDAYRYWGQGTQVTVSS

SEQ ID NO: 3256 - protein, 119 aa, synthetic construct
  REGION 1..119: note = Synthetic
EVQLLESGGGLVQPGGSLRLSCAASGLTFSIHTVGWFRQAPGKEREFVSAALGSGGRPYYRDSVKGRFTISRDNSKNTLYLQMNSLKPEDTAVYYCYVDVGTGLYYGYWGQGTQVTVSS

SEQ ID NO: 3257 - protein, 122 aa, synthetic construct
  REGION 1..122: note = Synthetic
EVQLLESGGGLVQPGGSLRLSCAASGRIFSSYFMGWFRQAPGKEREFVSAHISSEGSTYYRDSVKGRFTISRDNSKNTLYLQMNSLKPEDTAVYYCAAREYADTQRGEYAYWGQGTQVTVSS

SEQ ID NO: 3258 - protein, 117 aa, synthetic construct
  REGION 1..117: note = Synthetic
EVQLLESGGGLVQPGGSLRLSCAASGSIVSSYAMGWFRQAPGKEREFVSSAIGKGGVTIYADSVKGRFTISRDNSKNTLYLQMNSLKPEDTAVYYCATDESTYRDYWGQGTQVTVSS

SEQ ID NO: 3259 - protein, 116 aa, synthetic construct
  REGION 1..116: note = Synthetic
EVQLLESGGGLVQPGGSLRLSCAASGSLFQVEHIGWFRQAPGKERDFVSAQVTGGGYTYYADSVKGRFTISRDNSKNTLYLQMNSLKPEDTAVYYCYVRLVEEAYWGQGTQVTVSS

SEQ ID NO: 3260 - protein, 122 aa, synthetic construct
  REGION 1..122: note = Synthetic
EVQLLESGGGLVQPGGSLRLSCAASGTTFASSFMGWFRQAPGKEREFVSAIVFPGGSTYYADSVKGRFTISRDNSKNTLYLQMNSLKPEDTAVYYCAARRYELVDRLEYAYWGQGTQVTVSS

SEQ ID NO: 3261 - protein, 117 aa, synthetic construct
  REGION 1..117: note = Synthetic
EVQLLESGGGLVQPGGSLRLSCAASGSVFSSFTIGWFRQAPGKEREFVSAIVTSTGSTYYADSVKGRFTISRDNSKNTLYLQMNSLKPEDTAVYYCNVRTQEDYYYWGQGTQVTVSS

SEQ ID NO: 3262 - protein, 122 aa, synthetic construct
  REGION 1..122: note = Synthetic
EVQLLESGGGLVQPGGSLRLSCAASGSIFGSHFMGWFRQAPGKEREFVSAAVTSGGSTYYADSVKGRFTISRDNSKNTLYLQMNSLKPEDTAVYYCAARTYQSTYQPEYAYWGQGTQVTVSS

SEQ ID NO: 3263 - protein, 124 aa, synthetic construct
  REGION 1..124: note = Synthetic
EVQLLESGGGLVQPGGSLRLSCAASGSIFSILDIGWFRQAPGKEREFVSAYISSGGSTYYSDSVKGRFTISRDNSKNTLYLQMNSLKPEDTAVYYCVATIFGDRTEGQERYAFWGQGTQVTVSS

SEQ ID NO: 3264 - protein, 122 aa, synthetic construct
  REGION 1..122: note = Synthetic
EVQLLESGGGLVQPGGSLRLSCAASGSTTSSYFMGWFRQAPGKEREFVSAIITSSGSPYYADSVKGRFTISRDNSKNTLYLQMNSLKPEDTAVYYCAARRYGSRETDDYGYWGQGTQVTVSS

SEQ ID NO: 3265 - protein, 123 aa, synthetic construct
  REGION 1..123: note = Synthetic
EVQLLESGGGLVQPGGSLRLSCAASGSVFSSYSMWFRQAPGKEREFVSAIITSGGSTYYADSVKGRFTISRDNSKNTLYLQMNSLKPEDTAVYYCVAVYGIGTGQYIGTYDIWGQGTQVTVSS

SEQ ID NO: 3266 - protein, 121 aa, synthetic construct
  REGION 1..121: note = Synthetic
EVQLLESGGGLVQPGGSLRLSCAASGSLLSIYDMGWFRQAPGKEREFVSARIGKGGSTYYADSVKGRFTISRDNSKNTLYLQMNSLKPEDTAVYYCAVLVGEGESYGYHYWGQGTQVTVSS

SEQ ID NO: 3267 - protein, 123 aa, synthetic construct
  REGION 1..123: note = Synthetic
EVQLLESGGGLVQPGGSLRLSCAASGIGLSIYFMGWFRQAPGKEREFVSAIISSSGSTYYADSVKGRFTISRDNSKNTLYLQMNSLKPEDTAVYYCAARTGYSEYEQEDYGYWGQGTQVTVSS

SEQ ID NO: 3268 - protein, 122 aa, synthetic construct
  REGION 1..122: note = Synthetic
EVQLLESGGGLVQPGGSLRLSCAASGSIFSSSFIGWFRQAPGKEREFVSAVIASSGSTYYADSVKGRFTISRDNSKNTLYLQMNSLKPEDTAVYYCAGRFGQGGGTVEYGYWGQGTQVTVSS

SEQ ID NO: 3269 - protein, 122 aa, synthetic construct
  REGION 1..122: note = Synthetic
EVQLLESGGGLVQPGGSLRLSCAASGRVFSFYFMGWFRQAPGKEREFVSGVIGKTGSTYYTDSVKGRFTISRDNSKNTLYLQMNSLKPEDTAVYYCAASEYQGTGYGEFAYWGQGTQVTVSS

SEQ ID NO: 3270 - protein, 116 aa, synthetic construct
  REGION 1..116: note = Synthetic
EVQLLESGGGLVQPGGSLRLSCAASGSLFEVEHIGWFRQAPGKEREFVSAQVTGGGYTYYADSVKGRFTISRDNSKNTLYLQMNSLKPEDTAVYYCYVRLVEEAYWGQGTQVTVSS

SEQ ID NO: 3271 - protein, 124 aa, synthetic construct
  REGION 1..124: note = Synthetic
EVQLLESGGGLVQPGGSLRLSCAASGRIFGEYFIGWFRQAPGKEREFVSAIITGSGITHYADSVKGRFTISRDNSKNTLYLQMNSLKPEDTAVYYCAARTDYTTGQELPEYGYWGQGTQVTVSS

SEQ ID NO: 3272 - protein, 119 aa, synthetic construct
  REGION 1..119: note = Synthetic
EVQLLESGGGLVQPGGSLRLSCAASGSIESIYFIGWFRQAPGKEREFVSAEFIPGGSTVYSDSVKGRFTISRDNSKNTLYLQMNSLKPEDTAVYYCNAGLDEGRYYTYWGQGTQVTVSS

SEQ ID NO: 3273 - protein, 116 aa, synthetic construct
  REGION 1..116: note = Synthetic
EVQLLESGGGLVQPGGSLRLSCAASGIEVSSSVVGWFRQAPGKEREFVSASGVGGSTYYADSVKGRFTISRDNSKNTLYLQMNSLKPEDTAVYYCYAVYLTIYTYWGQGTQVTVSS

SEQ ID NO: 3274 - protein, 117 aa, synthetic construct
  REGION 1..117: note = Synthetic
EVQLLESGGGLVQPGGSLRLSCAASGFTISRYAMAWFRQAPGKEREFVSGSIFVGGGTYYRDSVKGRFTISRDNSKNTLYLQMNSLKPEDTAVYYCYATVGDSYYYWGQGTQVTVSS

SEQ ID NO: 3275 - protein, 116 aa, synthetic construct
  REGION 1..116: note = Synthetic
EVQLLESGGGLVQPGGSLRLSCAASGSLFSVEHIGWFRQAPGKEREFVSAQVTGGGYTYYADSVKGRFTISRDNSKNTLYLQMNSLKPEDTAVYYCYVRLVEEAYWGQGTQVTVSS

SEQ ID NO: 3276 - protein, 117 aa, synthetic construct
  REGION 1..117: note = Synthetic
EVQLLESGGGLVQPGGSLRLSCAASGFIFSIYDMGWFRQAPGKEREFVSAISTTGGSIYYADSVKGRFTISRDNSKNTLYLQMNSLKPEDTAVYYCNADPLESYGYWGQGTQVTVSS

SEQ ID NO: 3277 - protein, 119 aa, synthetic construct
  REGION 1..119: note = Synthetic
EVQLLESGGGLVQPGGSLRLSCAASGSVFSSYFIGWFRQAPGKEREFVSAVISSSGSTYYADSVKGRFTISRDNSKNTLYLQMNSLKPEDTAVYYCVAREDVGEPYGYWGQGTQVTVSS

SEQ ID NO: 3278 - DNA, 360 bp, synthetic construct
  misc_feature 1..360: note = Synthetic
  source 1..360: mol_type = other DNA
gaggtgcagctgttggagtctgggggaggcttggtacagcctggggggtccctgagactctcctgtgcagcctctggaaggggctttacaagctattacatgggatggttccgccaggctccagggaaggaacgggagttcgtctcagctgtgattttcccggagggttaccgctactacgcagactccgtgaagggccggttcaccatctccagagacaattccaagaacacgctgtatctgcaaatgaacagcctgaagcccgaggacacggccgtatattactgtgcgaaatacacaggtttcggtgaggacgcctatcgctactggggccaagggacccaggtcaccgtctcctca

SEQ ID NO: 3279 - DNA, 357 bp, synthetic construct
  misc_feature 1..357: note = Synthetic
  source 1..357: mol_type = other DNA
gaggtgcagctgttggagtctgggggaggcttggtacagcctggggggtccctgagactctcctgtgcagcctctggactcacctttagcatacatactgtgggatggttccgccaggctccagggaaggaaagagagttcgtctcagctgcactgggtagtgggggtcgaccttactaccgcgactccgtgaagggccggttcaccatctccagagacaattccaagaacacgctgtatctgcaaatgaacagcctgaaaccagaggacacggccgtatattactgttatgttgacgtggggacagggctgtactatggctactggggccaagggacccaggtcaccgtctcctca

SEQ ID NO: 3280 - DNA, 366 bp, synthetic construct
  misc_feature 1..366: note = Synthetic
  source 1..366: mol_type = other DNA
gaggtgcagctgttggagtctgggggaggcttggtacagcctggggggtccctgagactctcctgtgcagcctctggaaggatctttagcagctattttatggggtggtttcgccaggctccagggaaggaacgggagtttgtctcagcccatattagtagcgaaggtagcacatactacagagactccgtgaagggccggttcaccatctccagagacaattccaagaacacgctgtatctgcaaatgaacagcctgaaaccagaggacacggccgtatattactgtgcggcccgcgagtacgcggatacacagcgcggcgagtacgcttactggggccaagggacccaagtcaccgtctcctca

SEQ ID NO: 3281 - DNA, 351 bp, synthetic construct
  misc_feature 1..351: note = Synthetic
  source 1..351: mol_type = other DNA
gaggtgcagctgttggagtctgggggaggcttggtacagcctggggggtccctgagactctcctgtgcagcctctggatctatagtcagcagctatgccatgggctggttccgccaggctccagggaaggaaagagagttcgtctcatccgctattggaaagggtggtgtaacaatttatgcagactccgtgaagggccggttcaccatctccagagataattccaagaacacgctgtatctgcaaatgaacagcctgaagccagaggacacggccgtatattactgtgcgacagatgagtctacttaccgtgactactggggccaagggacccaggtcaccgtctcctca

SEQ ID NO: 3282 - DNA, 348 bp, synthetic construct
  misc_feature 1..348: note = Synthetic
  source 1..348: mol_type = other DNA
gaggtgcagctgttggagtctgggggaggcttggtacagcctggggggtccctgagactctcctgtgcagcctctggatcactatttcaggtggagcacatcgggtggtttcgccaggctccagggaaggaaagagatttcgtctcagctcaagtcaccggtggcggttatacatactacgcagactccgtgaagggccggttcaccatctccagagacaattccaagaacacgctgtatctgcaaatgaacagcctgaaaccggaggacacggccgtatattactgttacgtacggctcgtggaagaagcatactggggccaagggacccaagtcaccgtctcctca

SEQ ID NO: 3283 - DNA, 366 bp, synthetic construct
  misc_feature 1..366: note = Synthetic
  source 1..366: mol_type = other DNA
gaggtgcagctgttggagtctgggggaggcttggtacagcctggggggtccctgagactctcctgtgcagcctctggaacaacctttgccagctctttcatgggatggttccgccaggctccagggaaggagcgcgagtttgtctcagctattgtttttccggggggtagcacatactacgcagactccgtgaagggccggttcaccatctccagagacaattccaagaacacgctgtatctgcaaatgaacagcctgaagcctgaggacacggccgtatattactgtgcggctagaagatatgagttggtggacaggctggagtacgcctactggggccaagggacccaggtcaccgtctcctca

SEQ ID NO: 3284 - DNA, 351 bp, synthetic construct
  misc_feature 1..351: note = Synthetic
  source 1..351: mol_type = other DNA
gaggtgcagctgttggagtctgggggaggcttggtacagcctggggggtccctgagactctcctgtgcagcctctggaagcgtgtttagcagctttactattgggtggtttcgccaggctccagggaaggagcgcgagtttgtctcagctattgtcactagcaccggtagtacatactatgcagactccgtgaagggccggttcaccatctccagagacaattccaagaacacgctgtatctgcaaatgaacagcctgaaaccggaggacacggccgtatattactgtaatgtgaggacacaggaggactattactactggggccaagggacccaggtcaccgtctcctca

SEQ ID NO: 3285 - DNA, 366 bp, synthetic construct
  misc_feature 1..366: note = Synthetic
  source 1..366: mol_type = other DNA
gaggtgcagctgttggagtctgggggaggcttggtacagcctggggggtccctgagactctcctgtgcagcctctggaagcatttttggcagccacttcatgggctggtttcgccaggctccagggaaggagcgggagttcgtctcagctgcggttaccagcggaggtagtacatactatgcagactccgtgaagggccggttcaccatctccagagacaattccaagaacacgctgtatctgcaaatgaacagcctgaaacctgaggacacggccgtatattactgtgcggctcgaacctaccagtcaacgtatcagcctgaatatgcctactggggccaagggacccaggtcaccgtctcctca

SEQ ID NO: 3286 - DNA, 372 bp, synthetic construct
  misc_feature 1..372: note = Synthetic
  source 1..372: mol_type = other DNA
gaggtgcagctgttggagtctgggggaggcttggtacagcctggggggtccctgagactctcctgtgcagcctctggatctatctttagcatcctggacatcgggtggttccgccaggctccagggaaggaacgagagttcgtctcagcctatattagcagcggtggtagtacatactattccgactccgtgaagggccggttcaccatctccagagataattccaagaacacgctgtatctgcaaatgaacagcctgaagccagaggacacggccgtatattactgtgtggctaccatctttggtgatcgtaccgagggccaggaaaggtacgctttctggggccaagggacccaagtcaccgtctcctca

SEQ ID NO: 3287 - DNA, 366 bp, synthetic construct
  misc_feature 1..366: note = Synthetic
  source 1..366: mol_type = other DNA
gaggtgcagctgttggagtctgggggaggcttggtacagcctggggggtccctgagactctcctgtgcagcctctggaagcaccacgagcagctattttatgggatggttccgccaggctccagggaaggaacgcgagtttgtctcagctattataactagcagtggtagtccctactatgcagactccgtgaagggccggttcaccatctccagagacaattccaagaacacgctgtatctgcaaatgaacagcctgaaacccgaggacacggccgtatattactgtgcggcgcgtcggtatgggtcgagggaaacggacgactatgggtactggggccaagggacccaggtcaccgtctcctca

SEQ ID NO: 3288 - DNA, 369 bp, synthetic construct
  misc_feature 1..369: note = Synthetic
  source 1..369: mol_type = other DNA
gaggtgcagctgttggagtctgggggaggcttggtacagcctggggggtccctgagactctcctgtgcagcctctggatctgtctttagcagctatagcatgtggtttcgccaggctccagggaaggaacgcgagtttgtctcagctattatcactagtggcggtagcacatactacgcagactccgtgaagggccggttcaccatctccagagacaattccaagaacacgctgtatctgcaaatgaacagcctgaaacccgaggacacggccgtatattactgtgtggccgtttacggcataggaactggacaatacatcggtacatatgacatctggggccaagggacccaggtcaccgtctcctca

SEQ ID NO: 3289 - DNA, 363 bp, synthetic construct
  misc_feature 1..363: note = Synthetic
  source 1..363: mol_type = other DNA
gaggtgcagctgttggagtctgggggaggcttggtacagcctggggggtccctgagactctcctgtgcagcctctggatccctactgagcatttatgatatgggctggtttcgccaggctccagggaaggagcgagagttcgtctcagcccgtattggcaaaggtggtagtacatactatgcagactccgtgaagggccggttcaccatctccagagataattccaagaacacgctgtatctgcaaatgaacagcctgaaaccggaggacacggccgtatattactgtgcggttctggttggtgagggtgaatcttacggctatcactactggggccaagggacccaggtcaccgtctcctca

SEQ ID NO: 3290 - DNA, 369 bp, synthetic construct
  misc_feature 1..369: note = Synthetic
  source 1..369: mol_type = other DNA
gaggtgcagctgttggagtctgggggaggcttggtacagcctggggggtccctgagactctcctgtgcagcctctggaattggcctgagcatatatttcatgggatggtttcgccaggctccagggaaggagcgcgagtttgtctcagctattattagttctagtggtagcacatactacgcagactccgtgaagggccggttcaccatctccagagacaattccaagaacacgctgtatctgcaaatgaacagcctgaagccagaggacacggccgtatattactgtgcggctcgaaccggctactctgaatacgagcaggaagactatggctactggggccaagggacccaagtcaccgtctcctca

SEQ ID NO: 3291 - DNA, 366 bp, synthetic construct
  misc_feature 1..366: note = Synthetic
  source 1..366: mol_type = other DNA
gaggtgcagctgttggagtctgggggaggcttggtacagcctggggggtccctgagactctcctgtgcagcctctggaagcatttttagcagctccttcatcggatggttccgccaggctccagggaaggagcgggagtttgtctcagctgtcattgctagcagtggtagtacatactatgcagactccgtgaagggccggttcaccatctccagagacaattccaagaacacgctgtatctgcaaatgaacagcctgaaaccagaggacacggccgtatattactgtgcgggccggttcgggcaggggggggggaccgtggaatatggctactggggccaagggacccaagtcaccgtctcctca

SEQ ID NO: 3292 - DNA, 366 bp, synthetic construct
  misc_feature 1..366: note = Synthetic
  source 1..366: mol_type = other DNA
gaggtgcagctgttggagtctgggggaggcttggtacagcctggggggtccctgagactctcctgtgcagcctctggacgagtgtttagcttctattttatggggtggttccgccaggctccagggaaggaaagggagttcgtcagtggcgttattggcaaaaccggtagtacatactatactgactccgtgaagggccggttcaccatctccagagataattccaagaacacgctgtatctgcaaatgaacagcctgaaacccgaggacacggccgtatattactgtgcggccagtgaataccaaggtaccgggtacggagaatttgcatactggggccaagggacccaggtcaccgtctcctca

SEQ ID NO: 3293 - DNA, 348 bp, synthetic construct
  misc_feature 1..348: note = Synthetic
  source 1..348: mol_type = other DNA
gaggtgcagctgttggagtctgggggaggcttggtacagcctggggggtccctgagactctcctgtgcagcctctggaagtttgtttgaagtcgaacacatcggatggttccgccaggctccagggaaggagagggagtttgtctcagctcaagtgaccggtggcggttatacatactacgcagactccgtgaagggccggttcaccatctccagagacaattccaagaacacgctgtatctgcaaatgaacagcctgaaaccggaggacacggccgtatattactgttacgtccggcttgtggaggaagcctactggggccaagggacccaagtcaccgtctcctca

SEQ ID NO: 3294 - DNA, 372 bp, synthetic construct
  misc_feature 1..372: note = Synthetic
  source 1..372: mol_type = other DNA
gaggtgcagctgttggagtctgggggaggcttggtacagcctggggggtccctgagactctcctgtgcagcctctggacggatttttggagagtattttatcggatggttccgccaggctccagggaaggagcgggagttcgtctcagctattatcaccggcagtggtattacacactacgcagactccgtgaagggccggttcaccatctccagagacaattccaagaacacgctgtatctgcaaatgaacagcctgaaaccggaggacacggccgtatattactgtgcggcgcgcacagactacactacaggccaggaactaccagaatacgggtactggggccaagggacccaggtcaccgtctcctca

SEQ ID NO: 3295 - DNA, 357 bp, synthetic construct
  misc_feature 1..357: note = Synthetic
  source 1..357: mol_type = other DNA
gaggtgcagctgttggagtctgggggaggcttggtacagcctggggggtccctgagactctcctgtgcagcctctggatcaattgagagcatttatttcatcgggtggtttcgccaggctccagggaaggagagagagtttgtctcagctgaattcatcccaggaggtagcacagtgtactcagactccgtgaagggccggttcaccatctccagagacaattccaagaacacgctgtatctgcaaatgaacagcctgaaacccgaggacacggccgtatattactgtaacgccggcctagacgaagggcggtactacacctactggggccaagggacccaggtcaccgtctcctca

SEQ ID NO: 3296 - DNA, 348 bp, synthetic construct
  misc_feature 1..348: note = Synthetic
  source 1..348: mol_type = other DNA
gaggtgcagctgttggagtctgggggaggcttggtacagcctggggggtccctgagactctcctgtgcagcctctggaatagaggtcagcagcagtgtagtgggttggtttcgccaggctccagggaaggagcgggagtttgtctcagctagcggtgtgggaggtagcacatactacgcagactccgtgaagggccggttcaccatctccagagacaattccaagaacacgctgtatctgcaaatgaacagcctgaagcctgaggacacggccgtatattactgttatgcagtgtacttgaccatctacacctactggggccaagggacccaggtcaccgtctcctca

SEQ ID NO: 3297 - DNA, 351 bp, synthetic construct
  misc_feature 1..351: note = Synthetic
  source 1..351: mol_type = other DNA
gaggtgcagctgttggagtctgggggaggcttggtacagcctggggggtccctgagactctcctgtgcagcctctggattcaccatcagcagatatgccatggcatggtttcgccaggctccagggaaggaacgcgagttcgtcagtgggagcattttcgttggtggtggcacatactatagggactccgtgaagggccggttcaccatctccagagataattccaagaacacgctgtatctgcaaatgaacagcctgaaacctgaggacacggccgtatattactgttatgccaccgtgggtgactcctattattactggggccaagggacccaggtcaccgtctcctca

SEQ ID NO: 3298 - DNA, 348 bp, synthetic construct
  misc_feature 1..348: note = Synthetic
  source 1..348: mol_type = other DNA
gaggtgcagctgttggagtctgggggaggcttggtacagcctggggggtccctgagactctcctgtgcagcctctggaagcctgtttagcgttgagcacatcggctggttccgccaggctccagggaaggagagagagtttgtctcagctcaggtaaccggtgggggttatacatactacgcagactccgtgaagggccggttcaccatctccagagacaattccaagaacacgctgtatctgcaaatgaacagcctgaaaccagaggacacggccgtatattactgttatgttagacttgtggaggaagcttactggggccaagggacccaggtcaccgtctcctca

SEQ ID NO: 3299 - DNA, 351 bp, synthetic construct
  misc_feature 1..351: note = Synthetic
  source 1..351: mol_type = other DNA
gaggtgcagctgttggagtctgggggaggcttggtacagcctggggggtccctgagactctcctgtgcagcctctggattcatctttagcatttatgatatgggttggttccgccaggctccagggaaggaaagggagttcgtctcagctattagtactaccggtggaagcatttactacgcagactccgtgaagggccggttcaccatctccagagacaattccaagaacacgctgtatctgcaaatgaacagcctgaagccagaggacacggccgtatattactgtaacgccgaccctttagaaagctacgggtactggggccaagggacccaggtcaccgtctcctca

SEQ ID NO: 3300 - DNA, 357 bp, synthetic construct
  misc_feature 1..357: note = Synthetic
  source 1..357: mol_type = other DNA
gaggtgcagctgttggagtctgggggaggcttggtacagcctggggggtccctgagactctcctgtgcagcctctggatccgtatttagcagctatttcattggctggttccgccaggctccagggaaggagagagagttcgtctcagcagtgattagtagcagtggtagcacatactacgcagactccgtgaagggccggttcaccatctccagagacaattccaagaacacgctgtatctgcaaatgaacagcctgaagcctgaggacacggccgtatattactgtgttgcacgggaggatgttggcgagccctacggctactggggccaagggacccaggtcaccgtctcctca

SEQ ID NO: 3301 - DNA, 360 bp, synthetic construct
  misc_feature 1..360: note = Synthetic
  source 1..360: mol_type = other DNA
gaggtgcagctgctggaaagcggcggcggactggtgcaacctggaggatctctgagactgagctgcgctgcttctggccggggctttaccagctactacatgggctggttcagacaggcccctggcaaggaacgggaattcgtgtccgccgtgatcttcccagagggctaccggtactacgccgacagcgtgaaaggcagattcaccatcagcagagataatagcaagaacaccctgtacctgcagatgaacagcctcaagcccgaggacacagccgtctactattgtgccaagtacacaggcttcggcgaggacgcctacagatactggggccagggcacccaggtgaccgtgtccagc

SEQ ID NO: 3302 - DNA, 357 bp, synthetic construct
  misc_feature 1..357: note = Synthetic
  source 1..357: mol_type = other DNA
gaggtgcagctgctggaatctggcggaggcctggtgcaacctggaggatctctgagactgagctgtgccgcttctggcctcacattcagcatccacacagttggctggtttagacaggcccctggcaaagagcgggaattcgtgtccgccgccctgggcagcggcggacgcccatactatagagatagcgtgaagggcagattcaccatcagccgggacaatagcaagaacaccctgtacctgcagatgaacagcctgaagcccgaggacaccgccgtgtactactgctacgtggacgtgggcaccggcctgtactacggctactggggccagggcacacaggtgaccgtctccagc

SEQ ID NO: 3303 - DNA, 357 bp, synthetic construct; identical to SEQ ID NO: 3302
  misc_feature 1..357: note = Synthetic
  source 1..357: mol_type = other DNA

SEQ ID NO: 3304 - DNA, 351 bp, synthetic construct
  misc_feature 1..351: note = Synthetic
  source 1..351: mol_type = other DNA
gaggtgcagctgctggaaagcggaggcggcctggttcaacctggaggatctctgagactgagctgcgccgctagcggctctatcgtgtccagctacgccatgggctggtttagacaggcccctggcaaagagcgggaattcgtgtcctccgccatcggcaagggcggcgtcacaatctacgccgacagcgtgaagggcagattcaccatcagcagagataatagcaagaacaccctgtacctccagatgaacagcctgaagcccgaggacaccgccgtgtactattgtgctacagatgagagcacctaccgggactactggggccagggcacacaggtgaccgtgtctagc

SEQ ID NO: 3305 - DNA, 348 bp, synthetic construct
  misc_feature 1..348: note = Synthetic
  source 1..348: mol_type = other DNA
gaggtgcagctgctggaaagcggcggaggcctggtgcaacctggcggcagcctgagactgagctgcgctgcttctggatctctgtttcaggtcgagcacatcggctggttcagacaggcccctggcaaggaacgggacttcgtgtccgcccaggttacaggcggaggctacacctactacgccgacagcgtgaaaggcagattcaccatcagcagagataatagcaagaacaccctgtacctgcagatgaacagcctgaagcccgaggacaccgccgtgtactattgttacgtgcggctcgtggaagaggcctactggggccagggcacacaggtgaccgtgtccagc

SEQ ID NO: 3306 - DNA, 366 bp, synthetic construct
  misc_feature 1..366: note = Synthetic
  source 1..366: mol_type = other DNA
gaggtgcagctgctggaaagcggcggcggactggtgcaacctggcggatctctgcggttgtcttgtgctgccagcggaacaaccttcgcctctagctttatgggctggttccggcaggcccctggcaaggaaagagagttcgtgtccgccatcgtgttcccaggcggcagcacatactatgccgacagcgtgaagggcagattcaccatcagcagagataattcaaagaacaccctgtacctgcagatgaacagcctgaaacccgaggacaccgccgtgtactactgcgccgctagacggtacgagctggtcgacagactggaatacgcctactggggccagggcacacaggtgaccgtgtccagc

SEQ ID NO: 3307 - DNA, 351 bp, synthetic construct
  misc_feature 1..351: note = Synthetic
  source 1..351: mol_type = other DNA
gaggtgcagctgctggaaagcggcggcggactggttcagcctggaggaagcctgagactgtcttgtgccgcctctggctctgtgttcagcagctttaccatcggctggttccggcaggcccccggcaaggagagagaattcgtgtccgccatcgtgacaagcaccggcagcacatactacgctgatagcgtcaagggcagattcacaatcagcagagacaatagcaaaaacaccctgtacctgcaaatgaactccctcaagcctgaggacaccgccgtgtactactgcaacgtgcggacccaggaggactactactattggggccagggcacccaggtgaccgtgtccagc

SEQ ID NO: 3308 - DNA, 366 bp, synthetic construct
  misc_feature 1..366: note = Synthetic
  source 1..366: mol_type = other DNA
gaggtgcagctgctggaaagcggaggaggcctggtccagccaggcggctccctgagactgagctgtgccgcttctggcagcatcttcggcagccactttatgggctggttccggcaggcccctggcaaagagcgggaattcgtgtccgccgctgtgaccagcggcggatctacatattacgccgacagcgtgaagggcagattcaccatcagcagagataattctaagaacaccctgtacctgcagatgaacagcctcaagcccgaggacaccgccgtgtactactgcgccgccagaacctaccagagcacctaccaacctgagtacgcctactggggccagggcacacaggtgacagtgtccagc

SEQ ID NO: 3309 - DNA, 372 bp, synthetic construct
  misc_feature 1..372: note = Synthetic
  source 1..372: mol_type = other DNA
gaggtgcagctgctggaaagcggcggaggcctggtccaacctggcggcagcctgagactgtcttgtgctgcttccggatctatcttcagcatcctggacatcggctggttccgccaggcccctggcaaggaacgggaattcgtgtccgcctatatcagcagcggcggatctacatactacagcgacagcgtgaaaggcagattcaccattagcagagataatagcaagaacaccctgtacctgcagatgaacagcctcaagcccgaggacaccgccgtgtactactgcgtggccacaatctttggcgatagaaccgagggccaggagcggtacgccttctggggccagggcacacaggtgaccgtgtccagc

SEQ ID NO: 3310 - DNA, 366 bp, synthetic construct
  misc_feature 1..366: note = Synthetic
  source 1..366: mol_type = other DNA
gaggtgcagctgctggaaagcggaggcggcctggtccaaccaggcggatctctgcggctgagctgtgccgccagcggctctacaaccagcagctacttcatgggctggtttcggcaggcccctggcaaggaaagagagttcgtgtccgccatcatcacctcctccggcagcccctactacgccgacagcgtgaagggcagattcaccatcagcagagataatagcaagaacaccctgtacctccagatgaacagcctgaaacctgaggatacagccgtgtactactgcgctgctagacggtacggctctagagagacagacgactacggatattggggccagggcacccaggtgaccgtgtctagc

SEQ ID NO: 3311 - DNA, 369 bp, synthetic construct
  misc_feature 1..369: note = Synthetic
  source 1..369: mol_type = other DNA
gaggtgcagctgctggaaagcggcggcggcctggtgcaacctggaggctctctgcggctgagctgcgctgcttctggctccgtctttagcagctacagcatgtggttcagacaggcccctggcaaggaaagagagttcgtgtccgccattatcaccagcggcggcagcacctactacgccgatagcgtgaaaggcagattcaccatcagccgggacaatagcaagaacaccctgtacctgcagatgaacagcctcaagcccgaggacaccgccgtgtactattgtgtggccgtgtacggcatcggcacaggccagtacatcggaacatacgacatctggggacagggcacacaggtgaccgtgtctagc

SEQ ID NO: 3312 - DNA, 363 bp, synthetic construct
  misc_feature 1..363: note = Synthetic
  source 1..363: mol_type = other DNA
gaggtgcagctgctggaaagcggaggaggcctggtccaacctggaggatctctgcggctgagctgcgccgcttctggcagcctgctcagcatctacgacatgggctggtttagacaggcccctggcaaggaacgggaattcgtgtccgccagaatcggcaaaggcggctctacatactacgccgacagcgtgaagggcagattcaccatcagcagagataatagcaagaacaccctgtacctgcagatgaacagcctgaagcccgaggacacagccgtgtactattgtgctgtgctggtgggcgagggcgagagctacggctaccactactggggccagggcacccaggtgaccgtgtccagc

SEQ ID NO: 3313 - DNA, 369 bp, synthetic construct
  misc_feature 1..369: note = Synthetic
  source 1..369: mol_type = other DNA
gaggtgcagctgctggaaagcggcggcggactggtccaacctggaggcagcctgagactgtcttgtgccgccagcggcatcggcctctccatctactttatgggctggttccggcaggcccctggcaaggaacgggaattcgtgtccgccatcatcagcagcagcggatctacctactacgccgacagcgtgaaaggcagattcaccatctctagagataatagcaagaacaccctgtacctgcagatgaacagcctgaagcccgaggacaccgccgtgtactactgcgctgctagaaccggctacagcgagtacgagcaggaggactacggctattggggccagggcacacaggtgacagtgtccagc

SEQ ID NO: 3314 - DNA, 366 bp, synthetic construct
  misc_feature 1..366: note = Synthetic
  source 1..366: mol_type = other DNA
gaggtgcagctgctggaaagcggcggaggcctggtgcaacctggaggatctctcagactgagctgcgccgcttctggcagcatcttcagcagctccttcatcggctggttcagacaggcccctggcaaagagcgggaattcgtgtccgccgtgatcgcctcttctggcagcacctactacgccgacagcgtgaagggccggtttaccatcagcagagataatagcaagaacaccctgtacctgcagatgaacagcctgaagcccgaggacaccgccgtgtactattgtgctggcagattcggccagggcggcggcacagtcgagtacggctactggggccagggaacacaggtgaccgtgtccagc

SEQ ID NO: 3315 - DNA, 366 bp, synthetic construct
  misc_feature 1..366: note = Synthetic
  source 1..366: mol_type = other DNA
gaagtgcagctgctggaaagcggcggaggcctggtccaacctggaggatctctcagactgagctgtgccgccagcggcagagtgttcagcttctacttcatgggctggttccggcaggcccctggcaaagagcgggaatttgtgtccggcgtgatcggcaagacaggctctacatactacaccgacagcgtgaagggcagattcaccatcagcagagataatagcaagaacaccctgtacctgcagatgaacagcctgaagcccgaggacaccgccgtgtactactgcgctgcttctgagtaccagggcaccggctacggcgagtttgcctattggggccagggaacacaggtgaccgtgtccagc

SEQ ID NO: 3316 - DNA, 348 bp, synthetic construct
  misc_feature 1..348: note = Synthetic
  source 1..348: mol_type = other DNA
gaggtgcagctgctggaaagcggaggcggcctggtgcaacctggcggatctctgagactgagctgtgctgcttctggcagcctgttcgaggttgagcacatcggctggtttagacaggcccctggaaaagagcgggaattcgtgtccgcccaggtgaccggcggcggctacacctactatgccgacagcgtgaagggcagattcaccatcagcagagataatagcaagaacaccctgtacctgcagatgaacagcctcaagcccgaggacaccgccgtgtactactgctacgtgcggctggtcgaggaagcctactggggccagggcacacaggtgacagtgtccagc

SEQ ID NO: 3317 - DNA, 372 bp, synthetic construct
  misc_feature 1..372: note = Synthetic
  source 1..372: mol_type = other DNA
gaggtgcagctgctggaaagcggcggaggactggtccagcctggcggcagcctgcggctgagctgcgccgcctctggcagaatcttcggcgagtacttcatcggatggtttcggcaggccccaggaaaagagcgcgagttcgtgtccgccattatcacaggcagcggcatcacccactacgccgacagcgtgaagggcagattcaccatctccagagacaactctaagaataccctgtacctgcagatgaacagcctcaagcctgaagatacagccgtgtactactgtgctgctagaacagactacaccaccggccaagagctgcccgaatatggctactggggccagggcacccaggtgaccgtgagcagc

SEQ ID NO: 3318 - DNA, 357 bp, synthetic construct
  misc_feature 1..357: note = Synthetic
  source 1..357: mol_type = other DNA
gaggtgcagctgctggaaagcggcggcggcctcgtgcaacctggcggaagcctgagactgagctgcgccgcttctggctctatcgagagcatctacttcatcggctggttcagacaggcccctggcaaggaacgggaattcgtgtccgccgagtttatccccggaggcagcaccgtctacagcgacagcgtgaagggcagattcaccatcagcagagataacagcaagaacaccctgtacctgcagatgaacagcctgaaaccagaggacaccgccgtgtactactgtaatgccggcctggacgagggccggtactatacatactggggccagggcacacaggtgaccgtgtctagc

SEQ ID NO: 3319 - DNA, 348 bp, synthetic construct
  misc_feature 1..348: note = Synthetic
  source 1..348: mol_type = other DNA
gaggttcagctgctggaaagcggaggcggcctggtgcaacctggcggcagcctgcggctgagctgtgccgcttctggcatcgaggtgtctagcagcgtggtcggctggtttagacaggcccctggcaaggaaagagagttcgtgtccgccagcggcgtgggcggatctacatactacgctgatagcgtgaaaggcagattcaccatcagccgggacaatagcaagaacaccctgtacctgcagatgaacagcctcaagcccgaggacaccgccgtgtattactgctacgccgtgtacctgaccatctacacatactggggacagggcacacaggtgaccgtgtcctcc

SEQ ID NO: 3320 - DNA, 351 bp, synthetic construct
  misc_feature 1..351: note = Synthetic
  source 1..351: mol_type = other DNA
gaggtgcagctcctggaaagcggcggaggcctggtgcaacctggaggctctctgagactgtcttgtgccgctagcggatttaccatctccagatacgccatggcctggttccggcaggcccctggcaaggaaagagagttcgtgtccggcagcatcttcgtgggcggcggcacatactatagagatagcgtgaaaggccgcttcaccatcagccgggacaatagcaagaacaccctgtacctgcagatgaacagcctgaagcccgaggacaccgccgtgtactactgctacgctacagtcggcgacagctactactactggggccagggcacccaggtgacagtgtctagc

SEQ ID NO: 3321 - DNA, 348 bp, synthetic construct
  misc_feature 1..348: note = Synthetic
  source 1..348: mol_type = other DNA
gaggtgcagctgctggaaagcggcggaggcctggtgcaacctggaggcagcctgagactgagctgcgctgcttctggcagcctgttcagcgtggaacacatcggctggtttagacaggcccctggcaaagagcgggagttcgtgtccgcccaggttacaggcggcggctacacctactacgccgacagcgtgaagggcagattcaccatcagcagagataatagcaagaacaccctgtacctgcagatgaacagcctcaagcccgaggacaccgccgtgtactattgttacgtgcggctggtcgaggaagcctactggggccagggcacccaggtgacagtgtcttct

SEQ ID NO: 3322 - DNA, 351 bp, synthetic construct
  misc_feature 1..351: note = Synthetic
  source 1..351: mol_type = other DNA
gaggtgcagctgctggaaagcggaggcggcctggtccaacctggaggcagcctgagactgagctgcgccgctagcggctttatcttcagcatctacgacatgggctggttccggcaggcccctggcaaagagcgggaattcgtgtccgccatctctacaacaggcggatctatctactacgccgacagcgtgaagggcagattcaccatcagcagagataacagcaagaacaccctgtacctgcagatgaactccctcaagcccgaggacaccgccgtgtactattgtaatgctgatccactggagagctacggctactggggccagggcacccaggtgaccgtgtctagc

SEQ ID NO: 3323 - DNA, 357 bp, synthetic construct
  misc_feature 1..357: note = Synthetic
  source 1..357: mol_type = other DNA
gaggtgcagctgctggaatctggcggcggactggtgcaacctggcggcagcctgagactgagctgcgccgcttctggctctgtgttcagctcctactttatcggctggttccggcaggcccctggaaaggaaagagagttcgtgtccgccgtgatctccagcagcggaagcacctactacgccgacagcgtgaaaggcagattcaccatcagccgggacaatagcaagaacaccctgtacctgcagatgaacagcctcaagcccgaggacacagctgtctactattgtgtggccagagaagatgtgggcgagccatacggctactggggccagggcacacaggtgaccgtgtctagc

SEQ ID NO: 3324 - protein, 255 aa, synthetic construct
  REGION 1..255: note = Synthetic
EVQLLESGGGLVQPGGSLRLSCAASGRGFTSYYMGWFRQAPGKEREFVSAVIFPEGYRYYADSVKGRFTISRDNSKNTLYLQMNSLKPEDTAVYYCAKYTGFGEDAYRYWGQGTQVTVSSGGGGSGGGGSGGGGSEVQLLESGGGLVQPGGSLRLSCAASGRGFTSYYMGWFRQAPGKEREFVSAVIFPEGYRYYADSVKGRFTISRDNSKNTLYLQMNSLKPEDTAVYYCAKYTGFGEDAYRYWGQGTQVTVSS

SEQ ID NO: 3325 - protein, 253 aa, synthetic construct
  REGION 1..253: note = Synthetic
EVQLLESGGGLVQPGGSLRLSCAASGLTFSIHTVGWFRQAPGKEREFVSAALGSGGRPYYRDSVKGRFTISRDNSKNTLYLQMNSLKPEDTAVYYCYVDVGTGLYYGYWGQGTQVTVSSGGGGSGGGGSGGGGSEVQLLESGGGLVQPGGSLRLSCAASGLTFSIHTVGWFRQAPGKEREFVSAALGSGGRPYYRDSVKGRFTISRDNSKNTLYLQMNSLKPEDTAVYYCYVDVGTGLYYGYWGQGTQVTVSS

SEQ ID NO: 3326 - protein, 259 aa, synthetic construct
  REGION 1..259: note = Synthetic
EVQLLESGGGLVQPGGSLRLSCAASGRIFSSYFMGWFRQAPGKEREFVSAHISSEGSTYYRDSVKGRFTISRDNSKNTLYLQMNSLKPEDTAVYYCAAREYADTQRGEYAYWGQGTQVTVSSGGGGSGGGGSGGGGSEVQLLESGGGLVQPGGSLRLSCAASGRIFSSYFMGWFRQAPGKEREFVSAHISSEGSTYYRDSVKGRFTISRDNSKNTLYLQMNSLKPEDTAVYYCAAREYADTQRGEYAYWGQGTQVTVSS

SEQ ID NO: 3327 - protein, 249 aa, synthetic construct
  REGION 1..249: note = Synthetic
EVQLLESGGGLVQPGGSLRLSCAASGSIVSSYAMGWFRQAPGKEREFVSSAIGKGGVTIYADSVKGRFTISRDNSKNTLYLQMNSLKPEDTAVYYCATDESTYRDYWGQGTQVTVSSGGGGSGGGGSGGGGSEVQLLESGGGLVQPGGSLRLSCAASGSIVSSYAMGWFRQAPGKEREFVSSAIGKGGVTIYADSVKGRFTISRDNSKNTLYLQMNSLKPEDTAVYYCATDESTYRDYWGQGTQVTVSS

SEQ ID NO: 3328 - protein, 247 aa, synthetic construct
  REGION 1..247: note = Synthetic
EVQLLESGGGLVQPGGSLRLSCAASGSLFQVEHIGWFRQAPGKERDFVSAQVTGGGYTYYADSVKGRFTISRDNSKNTLYLQMNSLKPEDTAVYYCYVRLVEEAYWGQGTQVTVSSGGGGSGGGGSGGGGSEVQLLESGGGLVQPGGSLRLSCAASGSLFQVEHIGWFRQAPGKERDFVSAQVTGGGYTYYADSVKGRFTISRDNSKNTLYLQMNSLKPEDTAVYYCYVRLVEEAYWGQGTQVTVSS

SEQ ID NO: 3329 - protein, 259 aa, synthetic construct
  REGION 1..259: note = Synthetic
EVQLLESGGGLVQPGGSLRLSCAASGTTFASSFMGWFRQAPGKEREFVSAIVFPGGSTYYADSVKGRFTISRDNSKNTLYLQMNSLKPEDTAVYYCAARRYELVDRLEYAYWGQGTQVTVSSGGGGSGGGGSGGGGSEVQLLESGGGLVQPGGSLRLSCAASGTTFASSFMGWFRQAPGKEREFVSAIVFPGGSTYYADSVKGRFTISRDNSKNTLYLQMNSLKPEDTAVYYCAARRYELVDRLEYAYWGQGTQVTVSS

SEQ ID NO: 3330 - protein, 249 aa, synthetic construct
  REGION 1..249: note = Synthetic
EVQLLESGGGLVQPGGSLRLSCAASGSVFSSFTIGWFRQAPGKEREFVSAIVTSTGSTYYADSVKGRFTISRDNSKNTLYLQMNSLKPEDTAVYYCNVRTQEDYYYWGQGTQVTVSSGGGGSGGGGSGGGGSEVQLLESGGGLVQPGGSLRLSCAASGSVFSSFTIGWFRQAPGKEREFVSAIVTSTGSTYYADSVKGRFTISRDNSKNTLYLQMNSLKPEDTAVYYCNVRTQEDYYYWGQGTQVTVSS

SEQ ID NO: 3331 - protein, 259 aa, synthetic construct
  REGION 1..259: note = Synthetic
EVQLLESGGGLVQPGGSLRLSCAASGSIFGSHFMGWFRQAPGKEREFVSAAVTSGGSTYYADSVKGRFTISRDNSKNTLYLQMNSLKPEDTAVYYCAARTYQSTYQPEYAYWGQGTQVTVSSGGGGSGGGGSGGGGSEVQLLESGGGLVQPGGSLRLSCAASGSIFGSHFMGWFRQAPGKEREFVSAAVTSGGSTYYADSVKGRFTISRDNSKNTLYLQMNSLKPEDTAVYYCAARTYQSTYQPEYAYWGQGTQVTVSS

SEQ ID NO: 3332 - protein, 263 aa, synthetic construct
  REGION 1..263: note = Synthetic
EVQLLESGGGLVQPGGSLRLSCAASGSIFSILDIGWFRQAPGKEREFVSAYISSGGSTYYSDSVKGRFTISRDNSKNTLYLQMNSLKPEDTAVYYCVATIFGDRTEGQERYAFWGQGTQVTVSSGGGGSGGGGSGGGGSEVQLLESGGGLVQPGGSLRLSCAASGSIFSILDIGWFRQAPGKEREFVSAYISSGGSTYYSDSVKGRFTISRDNSKNTLYLQMNSLKPEDTAVYYCVATIFGDRTEGQERYAFWGQGTQVTVSS

SEQ ID NO: 3333 - protein, 259 aa, synthetic construct
  REGION 1..259: note = Synthetic
EVQLLESGGGLVQPGGSLRLSCAASGSTTSSYFMGWFRQAPGKEREFVSAIITSSGSPYYADSVKGRFTISRDNSKNTLYLQMNSLKPEDTAVYYCAARRYGSRETDDYGYWGQGTQVTVSSGGGGSGGGGSGGGGSEVQLLESGGGLVQPGGSLRLSCAASGSTTSSYFMGWFRQAPGKEREFVSAIITSSGSPYYADSVKGRFTISRDNSKNTLYLQMNSLKPEDTAVYYCAARRYGSRETDDYGYWGQGTQVTVSS

SEQ ID NO: 3334 - protein, 261 aa, synthetic construct
  REGION 1..261: note = Synthetic
EVQLLESGGGLVQPGGSLRLSCAASGSVFSSYSMWFRQAPGKEREFVSAIITSGGSTYYADSVKGRFTISRDNSKNTLYLQMNSLKPEDTAVYYCVAVYGIGTGQYIGTYDIWGQGTQVTVSSGGGGSGGGGSGGGGSEVQLLESGGGLVQPGGSLRLSCAASGSVFSSYSMWFRQAPGKEREFVSAIITSGGSTYYADSVKGRFTISRDNSKNTLYLQMNSLKPEDTAVYYCVAVYGIGTGQYIGTYDIWGQGTQVTVSS

SEQ ID NO: 3335 - protein, 257 aa, synthetic construct
  REGION 1..257: note = Synthetic
EVQLLESGGGLVQPGGSLRLSCAASGSLLSIYDMGWFRQAPGKEREFVSARIGKGGSTYYADSVKGRFTISRDNSKNTLYLQMNSLKPEDTAVYYCAVLVGEGESYGYHYWGQGTQVTVSSGGGGSGGGGSGGGGSEVQLLESGGGLVQPGGSLRLSCAASGSLLSIYDMGWFRQAPGKEREFVSARIGKGGSTYYADSVKGRFTISRDNSKNTLYLQMNSLKPEDTAVYYCAVLVGEGESYGYHYWGQGTQVTVSS

SEQ ID NO: 3336 - protein, 261 aa, synthetic construct
  REGION 1..261: note = Synthetic
EVQLLESGGGLVQPGGSLRLSCAASGIGLSIYFMGWFRQAPGKEREFVSAIISSSGSTYYADSVKGRFTISRDNSKNTLYLQMNSLKPEDTAVYYCAARTGYSEYEQEDYGYWGQGTQVTVSSGGGGSGGGGSGGGGSEVQLLESGGGLVQPGGSLRLSCAASGIGLSIYFMGWFRQAPGKEREFVSAIISSSGSTYYADSVKGRFTISRDNSKNTLYLQMNSLKPEDTAVYYCAARTGYSEYEQEDYGYWGQGTQVTVSS

SEQ ID NO: 3337 - protein, 259 aa, synthetic construct
  REGION 1..259: note = Synthetic
EVQLLESGGGLVQPGGSLRLSCAASGSIFSSSFIGWFRQAPGKEREFVSAVIASSGSTYYADSVKGRFTISRDNSKNTLYLQMNSLKPEDTAVYYCAGRFGQGGGTVEYGYWGQGTQVTVSSGGGGSGGGGSGGGGSEVQLLESGGGLVQPGGSLRLSCAASGSIFSSSFIGWFRQAPGKEREFVSAVIASSGSTYYADSVKGRFTISRDNSKNTLYLQMNSLKPEDTAVYYCAGRFGQGGGTVEYGYWGQGTQVTVSS

SEQ ID NO: 3338 - protein, 259 aa, synthetic construct
  REGION 1..259: note = Synthetic
EVQLLESGGGLVQPGGSLRLSCAASGRVFSFYFMGWFRQAPGKEREFVSGVIGKTGSTYYTDSVKGRFTISRDNSKNTLYLQMNSLKPEDTAVYYCAASEYQGTGYGEFAYWGQGTQVTVSSGGGGSGGGGSGGGGSEVQLLESGGGLVQPGGSLRLSCAASGRVFSFYFMGWFRQAPGKEREFVSGVIGKTGSTYYTDSVKGRFTISRDNSKNTLYLQMNSLKPEDTAVYYCAASEYQGTGYGEFAYWGQGTQVTVSS

SEQ ID NO: 3339 - protein, 247 aa, synthetic construct
  REGION 1..247: note = Synthetic
EVQLLESGGGLVQPGGSLRLSCAASGSLFEVEHIGWFRQAPGKEREFVSAQVTGGGYTYYADSVKGRFTISRDNSKNTLYLQMNSLKPEDTAVYYCYVRLVEEAYWGQGTQVTVSSGGGGSGGGGSGGGGSEVQLLESGGGLVQPGGSLRLSCAASGSLFEVEHIGWFRQAPGKEREFVSAQVTGGGYTYYADSVKGRFTISRDNSKNTLYLQMNSLKPEDTAVYYCYVRLVEEAYWGQGTQVTVSS

SEQ ID NO: 3340 - protein, 263 aa, synthetic construct
  REGION 1..263: note = Synthetic
EVQLLESGGGLVQPGGSLRLSCAASGRIFGEYFIGWFRQAPGKEREFVSAIITGSGITHYADSVKGRFTISRDNSKNTLYLQMNSLKPEDTAVYYCAARTDYTTGQELPEYGYWGQGTQVTVSSGGGGSGGGGSGGGGSEVQLLESGGGLVQPGGSLRLSCAASGRIFGEYFIGWFRQAPGKEREFVSAIITGSGITHYADSVKGRFTISRDNSKNTLYLQMNSLKPEDTAVYYCAARTDYTTGQELPEYGYWGQGTQVTVSS

SEQ ID NO: 3341 - protein, 253 aa, synthetic construct
  REGION 1..253: note = Synthetic
EVQLLESGGGLVQPGGSLRLSCAASGSIESIYFIGWFRQAPGKEREFVSAEFIPGGSTVYSDSVKGRFTISRDNSKNTLYLQMNSLKPEDTAVYYCNAGLDEGRYYTYWGQGTQVTVSSGGGGSGGGGSGGGGSEVQLLESGGGLVQPGGSLRLSCAASGSIESIYFIGWFRQAPGKEREFVSAEFIPGGSTVYSDSVKGRFTISRDNSKNTLYLQMNSLKPEDTAVYYCNAGLDEGRYYTYWGQGTQVTVSS

SEQ ID NO: 3342 - protein, 247 aa, synthetic construct
  REGION 1..247: note = Synthetic
EVQLLESGGGLVQPGGSLRLSCAASGIEVSSSVVGWFRQAPGKEREFVSASGVGGSTYYADSVKGRFTISRDNSKNTLYLQMNSLKPEDTAVYYCYAVYLTIYTYWGQGTQVTVSSGGGGSGGGGSGGGGSEVQLLESGGGLVQPGGSLRLSCAASGIEVSSSVVGWFRQAPGKEREFVSASGVGGSTYYADSVKGRFTISRDNSKNTLYLQMNSLKPEDTAVYYCYAVYLTIYTYWGQGTQVTVSS

SEQ ID NO: 3343 - protein, 249 aa, synthetic construct
  REGION 1..249: note = Synthetic
EVQLLESGGGLVQPGGSLRLSCAASGFTISRYAMAWFRQAPGKEREFVSGSIFVGGGTYYRDSVKGRFTISRDNSKNTLYLQMNSLKPEDTAVYYCYATVGDSYYYWGQGTQVTVSSGGGGSGGGGSGGGGSEVQLLESGGGLVQPGGSLRLSCAASGFTISRYAMAWFRQAPGKEREFVSGSIFVGGGTYYRDSVKGRFTISRDNSKNTLYLQMNSLKPEDTAVYYCYATVGDSYYYWGQGTQVTVSS

SEQ ID NO: 3344 - protein, 247 aa, synthetic construct
  REGION 1..247: note = Synthetic
EVQLLESGGGLVQPGGSLRLSCAASGSLFSVEHIGWFRQAPGKEREFVSAQVTGGGYTYYADSVKGRFTISRDNSKNTLYLQMNSLKPEDTAVYYCYVRLVEEAYWGQGTQVTVSSGGGGSGGGGSGGGGSEVQLLESGGGLVQPGGSLRLSCAASGSLFSVEHIGWFRQAPGKEREFVSAQVTGGGYTYYADSVKGRFTISRDNSKNTLYLQMNSLKPEDTAVYYCYVRLVEEAYWGQGTQVTVSS

SEQ ID NO: 3345 - protein, 249 aa, synthetic construct
  REGION 1..249: note = Synthetic
EVQLLESGGGLVQPGGSLRLSCAASGFIFSIYDMGWFRQAPGKEREFVSAISTTGGSIYYADSVKGRFTISRDNSKNTLYLQMNSLKPEDTAVYYCNADPLESYGYWGQGTQVTVSSGGGGSGGGGSGGGGSEVQLLESGGGLVQPGGSLRLSCAASGFIFSIYDMGWFRQAPGKEREFVSAISTTGGSIYYADSVKGRFTISRDNSKNTLYLQMNSLKPEDTAVYYCNADPLESYGYWGQGTQVTVSS

SEQ ID NO: 3346 - protein, 253 aa, synthetic construct
  REGION 1..253: note = Synthetic
EVQLLESGGGLVQPGGSLRLSCAASGSVFSSYFIGWFRQAPGKEREFVSAVISSSGSTYYADSVKGRFTISRDNSKNTLYLQMNSLKPEDTAVYYCVAREDVGEPYGYWGQGTQVTVSSGGGGSGGGGSGGGGSEVQLLESGGGLVQPGGSLRLSCAASGSVFSSYFIGWFRQAPGKEREFVSAVISSSGSTYYADSVKGRFTISRDNSKNTLYLQMNSLKPEDTAVYYCVAREDVGEPYGYWGQGTQVTVSS

SEQ ID NO: 3347 - DNA, 765 bp, synthetic construct
  misc_feature 1..765: note = Synthetic
  source 1..765: mol_type = other DNA
gaggtgcagctgttggagtctgggggaggcttggtacagcctggggggtccctgagactctcctgtgcagcctctggaaggggctttacaagctattacatgggatggttccgccaggctccagggaaggaacgggagttcgtctcagctgtgattttcccggagggttaccgctactacgcagactccgtgaagggccggttcaccatctccagagacaattccaagaacacgctgtatctgcaaatgaacagcctgaagcccgaggacacggccgtatattactgtgcgaaatacacaggtttcggtgaggacgcctatcgctactggggccaagggacccaggtcaccgtctcctcaggtggaggcggttcaggcggaggtggctctggcggtggcggatcggaggtgcagctgttggagtctgggggaggcttggtacagcctggggggtccctgagactctcctgtgcagcctctggaaggggctttacaagctattacatgggatggttccgccaggctccagggaaggaacgggagttcgtctcagctgtgattttcccggagggttaccgctactacgcagactccgtgaagggccggttcaccatctccagagacaattccaagaacacgctgtatctgcaaatgaacagcctgaagcccgaggacacggccgtatattactgtgcgaaatacacaggtttcggtgaggacgcctatcgctactggggccaagggacccaggtcaccgtctcctca

SEQ ID NO: 3348 - DNA, 759 bp, synthetic construct
  misc_feature 1..759: note = Synthetic
  source 1..759: mol_type = other DNA
gaggtgcagctgttggagtctgggggaggcttggtacagcctggggggtccctgagactctcctgtgcagcctctggactcacctttagcatacatactgtgggatggttccgccaggctccagggaaggaaagagagttcgtctcagctgcactgggtagtgggggtcgaccttactaccgcgactccgtgaagggccggttcaccatctccagagacaattccaagaacacgctgtatctgcaaatgaacagcctgaaaccagaggacacggccgtatattactgttatgttgacgtggggacagggctgtactatggctactggggccaagggacccaggtcaccgtctcctcaggtggaggcggttcaggcggaggtggctctggcggtggcggatcggaggtgcagctgttggagtctgggggaggcttggtacagcctggggggtccctgagactctcctgtgcagcctctggactcacctttagcatacatactgtgggatggttccgccaggctccagggaaggaaagagagttcgtctcagctgcactgggtagtgggggtcgaccttactaccgcgactccgtgaagggccggttcaccatctccagagacaattccaagaacacgctgtatctgcaaatgaacagcctgaaaccagaggacacggccgtatattactgttatgttgacgtggggacagggctgtactatggctactggggccaagggacccaggtcaccgtctcctca

SEQ ID NO: 3349 - DNA, 777 bp, synthetic construct
  misc_feature 1..777: note = Synthetic
  source 1..777: mol_type = other DNA
gaggtgcagctgttggagtctgggggaggcttggtacagcctggggggtccctgagactctcctgtgcagcctctggaaggatctttagcagctattttatggggtggtttcgccaggctccagggaaggaacgggagtttgtctcagcccatattagtagcgaaggtagcacatactacagagactccgtgaagggccggttcaccatctccagagacaattccaagaacacgctgtatctgcaaatgaacagcctgaaaccagaggacacggccgtatattactgtgcggcccgcgagtacgcggatacacagcgcggcgagtacgcttactggggccaagggacccaagtcaccgtctcctcaggtggaggcggttcaggcggaggtggctctggcggtggcggatcggaggtgcagctgttggagtctgggggaggcttggtacagcctggggggtccctgagactctcctgtgcagcctctggaaggatctttagcagctattttatggggtggtttcgccaggctccagggaaggaacgggagtttgtctcagcccatattagtagcgaaggtagcacatactacagagactccgtgaagggccggttcaccatctccagagacaattccaagaacacgctgtatctgcaaatgaacagcctgaaaccagaggacacggccgtatattactgtgcggcccgcgagtacgcggatacacagcgcggcgagtacgcttactggggccaagggacccaagtcaccgtctcctca

SEQ ID NO: 3350 - DNA, 747 bp, synthetic construct
  misc_feature 1..747: note = Synthetic
  source 1..747: mol_type = other DNA
gaggtgcagctgttggagtctgggggaggcttggtacagcctggggggtccctgagactctcctgtgcagcctctggatctatagtcagcagctatgccatgggctggttccgccaggctccagggaaggaaagagagttcgtctcatccgctattggaaagggtggtgtaacaatttatgcagactccgtgaagggccggttcaccatctccagagataattccaagaacacgctgtatctgcaaatgaacagcctgaagccagaggacacggccgtatattactgtgcgacagatgagtctacttaccgtgactactggggccaagggacccaggtcaccgtctcctcaggtggaggcggttcaggcggaggtggctctggcggtggcggatcggaggtgcagctgttggagtctgggggaggcttggtacagcctggggggtccctgagactctcctgtgcagcctctggatctatagtcagcagctatgccatgggctggttccgccaggctccagggaaggaaagagagttcgtctcatccgctattggaaagggtggtgtaacaatttatgcagactccgtgaagggccggttcaccatctccagagataattccaagaacacgctgtatctgcaaatgaacagcctgaagccagaggacacggccgtatattactgtgcgacagatgagtctacttaccgtgactactggggccaagggacccaggtcaccgtctcctca

SEQ ID NO: 3351 - DNA, 741 bp, synthetic construct
  misc_feature 1..741: note = Synthetic
  source 1..741: mol_type = other DNA
gaggtgcagctgttggagtctgggggaggcttggtacagcctggggggtccctgagactctcctgtgcagcctctggatcactatttcaggtggagcacatcgggtggtttcgccaggctccagggaaggaaagagatttcgtctcagctcaagtcaccggtggcggttatacatactacgcagactccgtgaagggccggttcaccatctccagagacaattccaagaacacgctgtatctgcaaatgaacagcctgaaaccggaggacacggccgtatattactgttacgtacggctcgtggaagaagcatactggggccaagggacccaagtcaccgtctcctcaggtggaggcggttcaggcggaggtggctctggcggtggcggatcggaggtgcagctgttggagtctgggggaggcttggtacagcctggggggtccctgagactctcctgtgcagcctctggatcactatttcaggtggagcacatcgggtggtttcgccaggctccagggaaggaaagagatttcgtctcagctcaagtcaccggtggcggttatacatactacgcagactccgtgaagggccggttcaccatctccagagacaattccaagaacacgctgtatctgcaaatgaacagcctgaaaccggaggacacggccgtatattactgttacgtacggctcgtggaagaagcatactggggccaagggacccaagtcaccgtctcctca

SEQ ID NO: 3352 - DNA, 777 bp, synthetic construct
  misc_feature 1..777: note = Synthetic
  source 1..777: mol_type = other DNA
gaggtgcagctgttggagtctgggggaggcttggtacagcctggggggtccctgagactctcctgtgcagcctctggaacaacctttgccagctctttcatgggatggttccgccaggctccagggaaggagcgcgagtttgtctcagctattgtttttccggggggtagcacatactacgcagactccgtgaagggccggttcaccatctccagagacaattccaagaacacgctgtatctgcaaatgaacagcctgaagcctgaggacacggccgtatattactgtgcggctagaagatatgagttggtggacaggctggagtacgcctactggggccaagggacccaggtcaccgtctcctcaggtggaggcggttcaggcggaggtggctctggcggtggcggatcggaggtgcagctgttggagtctgggggaggcttggtacagcctggggggtccctgagactctcctgtgcagcctctggaacaacctttgccagctctttcatgggatggttccgccaggctccagggaaggagcgcgagtttgtctcagctattgtttttccggggggtagcacatactacgcagactccgtgaagggccggttcaccatctccagagacaattccaagaacacgctgtatctgcaaatgaacagcctgaagcctgaggacacggccgtatattactgtgcggctagaagatatgagttggtggacaggctggagtacgcctactggggccaagggacccaggtcaccgtctcctca

SEQ ID NO: 3353 - DNA, 747 bp, synthetic construct
  misc_feature 1..747: note = Synthetic
  source 1..747: mol_type = other DNA
gaggtgcagctgttggagtctgggggaggcttggtacagcctggggggtccctgagactctcctgtgcagcctctggaagcgtgtttagcagctttactattgggtggtttcgccaggctccagggaaggagcgcgagtttgtctcagctattgtcactagcaccggtagtacatactatgcagactccgtgaagggccggttcaccatctccagagacaattccaagaacacgctgtatctgcaaatgaacagcctgaaaccggaggacacggccgtatattactgtaatgtgaggacacaggaggactattactactggggccaagggacccaggtcaccgtctcctcaggtggaggcggttcaggcggaggtggctctggcggtggcggatcggaggtgcagctgttggagtctgggggaggcttggtacagcctggggggtccctgagactctcctgtgcagcctctggaagcgtgtttagcagctttactattgggtggtttcgccaggctccagggaaggagcgcgagtttgtctcagctattgtcactagcaccggtagtacatactatgcagactccgtgaagggccggttcaccatctccagagacaattccaagaacacgctgtatctgcaaatgaacagcctgaaaccggaggacacggccgtatattactgtaatgtgaggacacaggaggactattactactggggccaagggacccaggtcaccgtctcctca

SEQ ID NO: 3354 - DNA, 777 bp, synthetic construct
  misc_feature 1..777: note = Synthetic
  source 1..777: mol_type = other DNA
gaggtgcagctgttggagtctgggggaggcttggtacagcctggggggtccctgagactctcctgtgcagcctctggaagcatttttggcagccacttcatgggctggtttcgccaggctccagggaaggagcgggagttcgtctcagctgcggttaccagcggaggtagtacatactatgcagactccgtgaagggccggttcaccatctccagagacaattccaagaacacgctgtatctgcaaatgaacagcctgaaacctgaggacacggccgtatattactgtgcggctcgaacctaccagtcaacgtatcagcctgaatatgcctactggggccaagggacccaggtcaccgtctcctcaggtggaggcggttcaggcggaggtggctctggcggtggcggatcggaggtgcagctgttggagtctgggggaggcttggtacagcctggggggtccctgagactctcctgtgcagcctctggaagcatttttggcagccacttcatgggctggtttcgccaggctccagggaaggagcgggagttcgtctcagctgcggttaccagcggaggtagtacatactatgcagactccgtgaagggccggttcaccatctccagagacaattccaagaacacgctgtatctgcaaatgaacagcctgaaacctgaggacacggccgtatattactgtgcggctcgaacctaccagtcaacgtatcagcctgaatatgcctactggggccaagggacccaggtcaccgtctcctca

SEQ ID NO: 3355 - DNA, 789 bp, synthetic construct
  misc_feature 1..789: note = Synthetic
  source 1..789: mol_type = other DNA
gaggtgcagctgttggagtctgggggaggcttggtacagcctggggggtccctgagactctcctgtgcagcctctggatctatctttagcatcctggacatcgggtggttccgccaggctccagggaaggaacgagagttcgtctcagcctatattagcagcggtggtagtacatactattccgactccgtgaagggccggttcaccatctccagagataattccaagaacacgctgtatctgcaaatgaacagcctgaagccagaggacacggccgtatattactgtgtggctaccatctttggtgatcgtaccgagggccaggaaaggtacgctttctggggccaagggacccaagtcaccgtctcctcaggtggaggcggttcaggcggaggtggctctggcggtggcggatcggaggtgcagctgttggagtctgggggaggcttggtacagcctggggggtccctgagactctcctgtgcagcctctggatctatctttagcatcctggacatcgggtggttccgccaggctccagggaaggaacgagagttcgtctcagcctatattagcagcggtggtagtacatactattccgactccgtgaagggccggttcaccatctccagagataattccaagaacacgctgtatctgcaaatgaacagcctgaagccagaggacacggccgtatattactgtgtggctaccatctttggtgatcgtaccgagggccaggaaaggtacgctttctggggccaagggacccaagtcaccgtctcctca

SEQ ID NO: 3356 - DNA, 777 bp, synthetic construct
  misc_feature 1..777: note = Synthetic
  source 1..777: mol_type = other DNA
gaggtgcagctgttggagtctgggggaggcttggtacagcctggggggtccctgagactctcctgtgcagcctctggaagcaccacgagcagctattttatgggatggttccgccaggctccagggaaggaacgcgagtttgtctcagctattataactagcagtggtagtccctactatgcagactccgtgaagggccggttcaccatctccagagacaattccaagaacacgctgtatctgcaaatgaacagcctgaaacccgaggacacggccgtatattactgtgcggcgcgtcggtatgggtcgagggaaacggacgactatgggtactggggccaagggacccaggtcaccgtctcctcaggtggaggcggttcaggcggaggtggctctggcggtggcggatcggaggtgcagctgttggagtctgggggaggcttggtacagcctggggggtccctgagactctcctgtgcagcctctggaagcaccacgagcagctattttatgggatggttccgccaggctccagggaaggaacgcgagtttgtctcagctattataactagcagtggtagtccctactatgcagactccgtgaagggccggttcaccatctccagagacaattccaagaacacgctgtatctgcaaatgaacagcctgaaacccgaggacacggccgtatattactgtgcggcgcgtcggtatgggtcgagggaaacggacgactatgggtactggggccaagggacccaggtcaccgtctcctca

SEQ ID NO: 3357 - DNA, 783 bp, synthetic construct
  misc_feature 1..783: note = Synthetic
  source 1..783: mol_type = other DNA
gaggtgcagctgttggagtctgggggaggcttggtacagcctggggggtccctgagactctcctgtgcagcctctggatctgtctttagcagctatagcatgtggtttcgccaggctccagggaaggaacgcgagtttgtctcagctattatcactagtggcggtagcacatactacgcagactccgtgaagggccggttcaccatctccagagacaattccaagaacacgctgtatctgcaaatgaacagcctgaaacccgaggacacggccgtatattactgtgtggccgtttacggcataggaactggacaatacatcggtacatatgacatctggggccaagggacccaggtcaccgtctcctcaggtggaggcggttcaggcggaggtggctctggcggtggcggatcggaggtgcagctgttggagtctgggggaggcttggtacagcctggggggtccctgagactctcctgtgcagcctctggatctgtctttagcagctatagcatgtggtttcgccaggctccagggaaggaacgcgagtttgtctcagctattatcactagtggcggtagcacatactacgcagactccgtgaagggccggttcaccatctccagagacaattccaagaacacgctgtatctgcaaatgaacagcctgaaacccgaggacacggccgtatattactgtgtggccgtttacggcataggaactggacaatacatcggtacatatgacatctggggccaagggacccaggtcaccgtctcctca

SEQ ID NO: 3358 - DNA, 771 bp, synthetic construct
  misc_feature 1..771: note = Synthetic
  source 1..771: mol_type = other DNA
gaggtgcagctgttggagtctgggggaggcttggtacagcctggggggtccctgagactctcctgtgcagcctctggatccctactgagcatttatgatatgggctggtttcgccaggctccagggaaggagcgagagttcgtctcagcccgtattggcaaaggtggtagtacatactatgcagactccgtgaagggccggttcaccatctccagagataattccaagaacacgctgtatctgcaaatgaacagcctgaaaccggaggacacggccgtatattactgtgcggttctggttggtgagggtgaatcttacggctatcactactggggccaagggacccaggtcaccgtctcctcaggtggaggcggttcaggcggaggtggctctggcggtggcggatcggaggtgcagctgttggagtctgggggaggcttggtacagcctggggggtccctgagactctcctgtgcagcctctggatccctactgagcatttatgatatgggctggtttcgccaggctccagggaaggagcgagagttcgtctcagcccgtattggcaaaggtggtagtacatactatgcagactccgtgaagggccggttcaccatctccagagataattccaagaacacgctgtatctgcaaatgaacagcctgaaaccggaggacacggccgtatattactgtgcggttctggttggtgagggtgaatcttacggctatcactactggggccaagggacccaggtcaccgtctcctca

SEQ ID NO: 3359 - DNA, 783 bp, synthetic construct
  misc_feature 1..783: note = Synthetic
  source 1..783: mol_type = other DNA
gaggtgcagctgttggagtctgggggaggcttggtacagcctggggggtccctgagactctcctgtgcagcctctggaattggcctgagcatatatttcatgggatggtttcgccaggctccagggaaggagcgcgagtttgtctcagctattattagttctagtggtagcacatactacgcagactccgtgaagggccggttcaccatctccagagacaattccaagaacacgctgtatctgcaaatgaacagcctgaagccagaggacacggccgtatattactgtgcggctcgaaccggctactctgaatacgagcaggaagactatggctactggggccaagggacccaagtcaccgtctcctcaggtggaggcggttcaggcggaggtggctctggcggtggcggatcggaggtgcagctgttggagtctgggggaggcttggtacagcctggggggtccctgagactctcctgtgcagcctctggaattggcctgagcatatatttcatgggatggtttcgccaggctccagggaaggagcgcgagtttgtctcagctattattagttctagtggtagcacatactacgcagactccgtgaagggccggttcaccatctccagagacaattccaagaacacgctgtatctgcaaatgaacagcctgaagccagaggacacggccgtatattactgtgcggctcgaaccggctactctgaatacgagcaggaagactatggctactggggccaagggacccaagtcaccgtctcctca

SEQ ID NO: 3360 - DNA, 777 bp, synthetic construct
  misc_feature 1..777: note = Synthetic
  source 1..777: mol_type = other DNA
gaggtgcagctgttggagtctgggggaggcttggtacagcctggggggtccctgagactctcctgtgcagcctctggaagcatttttagcagctccttcatcggatggttccgccaggctccagggaaggagcgggagtttgtctcagctgtcattgctagcagtggtagtacatactatgcagactccgtgaagggccggttcaccatctccagagacaattccaagaacacgctgtatctgcaaatgaacagcctgaaaccagaggacacggccgtatattactgtgcgggccggttcgggcaggggggggggaccgtggaatatggctactggggccaagggacccaagtcaccgtctcctcaggtggaggcggttcaggcggaggtggctctggcggtggcggatcggaggtgcagctgttggagtctgggggaggcttggtacagcctggggggtccctgagactctcctgtgcagcctctggaagcatttttagcagctccttcatcggatggttccgccaggctccagggaaggagcgggagtttgtctcagctgtcattgctagcagtggtagtacatactatgcagactccgtgaagggccggttcaccatctccagagacaattccaagaacacgctgtatctgcaaatgaacagcctgaaaccagaggacacggccgtatattactgtgcgggccggttcgggcaggggggggggaccgtggaatatggctactggggccaagggacccaagtcaccgtctcctca

SEQ ID NO: 3361 - DNA, 777 bp, synthetic construct
  misc_feature 1..777: note = Synthetic
  source 1..777: mol_type = other DNA
gaggtgcagctgttggagtctgggggaggcttggtacagcctggggggtccctgagactctcctgtgcagcctctggacgagtgtttagcttctattttatggggtggttccgccaggctccagggaaggaaagggagttcgtcagtggcgttattggcaaaaccggtagtacatactatactgactccgtgaagggccggttcaccatctccagagataattccaagaacacgctgtatctgcaaatgaacagcctgaaacccgaggacacggccgtatattactgtgcggccagtgaataccaaggtaccgggtacggagaatttgcatactggggccaagggacccaggtcaccgtctcctcaggtggaggcggttcaggcggaggtggctctggcggtggcggatcggaggtgcagctgttggagtctgggggaggcttggtacagcctggggggtccctgagactctcctgtgcagcctctggacgagtgtttagcttctattttatggggtggttccgccaggctccagggaaggaaagggagttcgtcagtggcgttattggcaaaaccggtagtacatactatactgactccgtgaagggccggttcaccatctccagagataattccaagaacacgctgtatctgcaaatgaacagcctgaaacccgaggacacggccgtatattactgtgcggccagtgaataccaaggtaccgggtacggagaatttgcatactggggccaagggacccaggtcaccgtctcctca

SEQ ID NO: 3362 - DNA, 741 bp, synthetic construct
  misc_feature 1..741: note = Synthetic
  source 1..741: mol_type = other DNA
gaggtgcagctgttggagtctgggggaggcttggtacagcctggggggtccctgagactctcctgtgcagcctctggaagtttgtttgaagtcgaacacatcggatggttccgccaggctccagggaaggagagggagtttgtctcagctcaagtgaccggtggcggttatacatactacgcagactccgtgaagggccggttcaccatctccagagacaattccaagaacacgctgtatctgcaaatgaacagcctgaaaccggaggacacggccgtatattactgttacgtccggcttgtggaggaagcctactggggccaagggacccaagtcaccgtctcctcaggtggaggcggttcaggcggaggtggctctggcggtggcggatcggaggtgcagctgttggagtctgggggaggcttggtacagcctggggggtccctgagactctcctgtgcagcctctggaagtttgtttgaagtcgaacacatcggatggttccgccaggctccagggaaggagagggagtttgtctcagctcaagtgaccggtggcggttatacatactacgcagactccgtgaagggccggttcaccatctccagagacaattccaagaacacgctgtatctgcaaatgaacagcctgaaaccggaggacacggccgtatattactgttacgtccggcttgtggaggaagcctactggggccaagggacccaagtcaccgtctcctca

SEQ ID NO: 3363 - DNA, 789 bp, synthetic construct
  misc_feature 1..789: note = Synthetic
  source 1..789: mol_type = other DNA
gaggtgcagctgttggagtctgggggaggcttggtacagcctggggggtccctgagactctcctgtgcagcctctggacggatttttggagagtattttatcggatggttccgccaggctccagggaaggagcgggagttcgtctcagctattatcaccggcagtggtattacacactacgcagactccgtgaagggccggttcaccatctccagagacaattccaagaacacgctgtatctgcaaatgaacagcctgaaaccggaggacacggccgtatattactgtgcggcgcgcacagactacactacaggccaggaactaccagaatacgggtactggggccaagggacccaggtcaccgtctcctcaggtggaggcggttcaggcggaggtggctctggcggtggcggatcggaggtgcagctgttggagtctgggggaggcttggtacagcctggggggtccctgagactctcctgtgcagcctctggacggatttttggagagtattttatcggatggttccgccaggctccagggaaggagcgggagttcgtctcagctattatcaccggcagtggtattacacactacgcagactccgtgaagggccggttcaccatctccagagacaattccaagaacacgctgtatctgcaaatgaacagcctgaaaccggaggacacggccgtatattactgtgcggcgcgcacagactacactacaggccaggaactaccagaatacgggtactggggccaagggacccaggtcaccgtctcctca

SEQ ID NO: 3364 - DNA, 759 bp, synthetic construct
  misc_feature 1..759: note = Synthetic
  source 1..759: mol_type = other DNA
gaggtgcagctgttggagtctgggggaggcttggtacagcctggggggtccctgagactctcctgtgcagcctctggatcaattgagagcatttatttcatcgggtggtttcgccaggctccagggaaggagagagagtttgtctcagctgaattcatcccaggaggtagcacagtgtactcagactccgtgaagggccggttcaccatctccagagacaattccaagaacacgctgtatctgcaaatgaacagcctgaaacccgaggacacggccgtatattactgtaacgccggcctagacgaagggcggtactacacctactggggccaagggacccaggtcaccgtctcctcaggtggaggcggttcaggcggaggtggctctggcggtggcggatcggaggtgcagctgttggagtctgggggaggcttggtacagcctggggggtccctgagactctcctgtgcagcctctggatcaattgagagcatttatttcatcgggtggtttcgccaggctccagggaaggagagagagtttgtctcagctgaattcatcccaggaggtagcacagtgtactcagactccgtgaagggccggttcaccatctccagagacaattccaagaacacgctgtatctgcaaatgaacagcctgaaacccgaggacacggccgtatattactgtaacgccggcctagacgaagggcggtactacacctactggggccaagggacccaggtcaccgtctcctca

SEQ ID NO: 3365 - DNA, 741 bp, synthetic construct
  misc_feature 1..741: note = Synthetic
  source 1..741: mol_type = other DNA
gaggtgcagctgttggagtctgggggaggcttggtacagcctggggggtccctgagactctcctgtgcagcctctggaatagaggtcagcagcagtgtagtgggttggtttcgccaggctccagggaaggagcgggagtttgtctcagctagcggtgtgggaggtagcacatactacgcagactccgtgaagggccggttcaccatctccagagacaattccaagaacacgctgtatctgcaaatgaacagcctgaagcctgaggacacggccgtatattactgttatgcagtgtacttgaccatctacacctactggggccaagggacccaggtcaccgtctcctcaggtggaggcggttcaggcggaggtggctctggcggtggcggatcggaggtgcagctgttggagtctgggggaggcttggtacagcctggggggtccctgagactctcctgtgcagcctctggaatagaggtcagcagcagtgtagtgggttggtttcgccaggctccagggaaggagcgggagtttgtctcagctagcggtgtgggaggtagcacatactacgcagactccgtgaagggccggttcaccatctccagagacaattccaagaacacgctgtatctgcaaatgaacagcctgaagcctgaggacacggccgtatattactgttatgcagtgtacttgaccatctacacctactggggccaagggacccaggtcaccgtctcctca

SEQ ID NO: 3366 - DNA, 747 bp, synthetic construct
  misc_feature 1..747: note = Synthetic
  source 1..747: mol_type = other DNA
gaggtgcagctgttggagtctgggggaggcttggtacagcctggggggtccctgagactctcctgtgcagcctctggattcaccatcagcagatatgccatggcatggtttcgccaggctccagggaaggaacgcgagttcgtcagtgggagcattttcgttggtggtggcacatactatagggactccgtgaagggccggttcaccatctccagagataattccaagaacacgctgtatctgcaaatgaacagcctgaaacctgaggacacggccgtatattactgttatgccaccgtgggtgactcctattattactggggccaagggacccaggtcaccgtctcctcaggtggaggcggttcaggcggaggtggctctggcggtggcggatcggaggtgcagctgttggagtctgggggaggcttggtacagcctggggggtccctgagactctcctgtgcagcctctggattcaccatcagcagatatgccatggcatggtttcgccaggctccagggaaggaacgcgagttcgtcagtgggagcattttcgttggtggtggcacatactatagggactccgtgaagggccggttcaccatctccagagataattccaagaacacgctgtatctgcaaatgaacagcctgaaacctgaggacacggccgtatattactgttatgccaccgtgggtgactcctattattactggggccaagggacccaggtcaccgtctcctca

SEQ ID NO: 3367 - DNA, 741 bp, synthetic construct
  misc_feature 1..741: note = Synthetic
  source 1..741: mol_type = other DNA
gaggtgcagctgttggagtctgggggaggcttggtacagcctggggggtccctgagactctcctgtgcagcctctggaagcctgtttagcgttgagcacatcggctggttccgccaggctccagggaaggagagagagtttgtctcagctcaggtaaccggtgggggttatacatactacgcagactccgtgaagggccggttcaccatctccagagacaattccaagaacacgctgtatctgcaaatgaacagcctgaaaccagaggacacggccgtatattactgttatgttagacttgtggaggaagcttactggggccaagggacccaggtcaccgtctcctcaggtggaggcggttcaggcggaggtggctctggcggtggcggatcggaggtgcagctgttggagtctgggggaggcttggtacagcctggggggtccctgagactctcctgtgcagcctctggaagcctgtttagcgttgagcacatcggctggttccgccaggctccagggaaggagagagagtttgtctcagctcaggtaaccggtgggggttatacatactacgcagactccgtgaagggccggttcaccatctccagagacaattccaagaacacgctgtatctgcaaatgaacagcctgaaaccagaggacacggccgtatattactgttatgttagacttgtggaggaagcttactggggccaagggacccaggtcaccgtctcctca

SEQ ID NO: 3368 - DNA, 747 bp, synthetic construct
  misc_feature 1..747: note = Synthetic
  source 1..747: mol_type = other DNA
gaggtgcagctgttggagtctgggggaggcttggtacagcctggggggtccctgagactctcctgtgcagcctctggattcatctttagcatttatgatatgggttggttccgccaggctccagggaaggaaagggagttcgtctcagctattagtactaccggtggaagcatttactacgcagactccgtgaagggccggttcaccatctccagagacaattccaagaacacgctgtatctgcaaatgaacagcctgaagccagaggacacggccgtatattactgtaacgccgaccctttagaaagctacgggtactggggccaagggacccaggtcaccgtctcctcaggtggaggcggttcaggcggaggtggctctggcggtggcggatcggaggtgcagctgttggagtctgggggaggcttggtacagcctggggggtccctgagactctcctgtgcagcctctggattcatctttagcatttatgatatgggttggttccgccaggctccagggaaggaaagggagttcgtctcagctattagtactaccggtggaagcatttactacgcagactccgtgaagggccggttcaccatctccagagacaattccaagaacacgctgtatctgcaaatgaacagcctgaagccagaggacacggccgtatattactgtaacgccgaccctttagaaagctacgggtactggggccaagggacccaggtcaccgtctcctca

SEQ ID NO: 3369 - DNA, 759 bp, synthetic construct
  misc_feature 1..759: note = Synthetic
  source 1..759: mol_type = other DNA
gaggtgcagctgttggagtctgggggaggcttggtacagcctggggggtccctgagactctcctgtgcagcctctggatccgtatttagcagctatttcattggctggttccgccaggctccagggaaggagagagagttcgtctcagcagtgattagtagcagtggtagcacatactacgcagactccgtgaagggccggttcaccatctccagagacaattccaagaacacgctgtatctgcaaatgaacagcctgaagcctgaggacacggccgtatattactgtgttgcacgggaggatgttggcgagccctacggctactggggccaagggacccaggtcaccgtctcctcaggtggaggcggttcaggcggaggtggctctggcggtggcggatcggaggtgcagctgttggagtctgggggaggcttggtacagcctggggggtccctgagactctcctgtgcagcctctggatccgtatttagcagctatttcattggctggttccgccaggctccagggaaggagagagagttcgtctcagcagtgattagtagcagtggtagcacatactacgcagactccgtgaagggccggttcaccatctccagagacaattccaagaacacgctgtatctgcaaatgaacagcctgaagcctgaggacacggccgtatattactgtgttgcacgggaggatgttggcgagccctacggctactggggccaagggacccaggtcaccgtctcctca

SEQ ID NO: 3370 - DNA, 765 bp, synthetic construct
  misc_feature 1..765: note = Synthetic
  source 1..765: mol_type = other DNA
gaggtgcagctgctggaaagcggcggcggactggtgcaacctggaggatctctgagactgagctgcgctgcttctggccggggctttaccagctactacatgggctggttcagacaggcccctggcaaggaacgggaattcgtgtccgccgtgatcttcccagagggctaccggtactacgccgacagcgtgaaaggcagattcaccatcagcagagataatagcaagaacaccctgtacctgcagatgaacagcctcaagcccgaggacacagccgtctactattgtgccaagtacacaggcttcggcgaggacgcctacagatactggggccagggcacccaggtgaccgtgtccagcggtggcggtggctcgggcggtggtgggtcgggtggcggcggatctgaggtgcagctgctggagagcggaggtggtctggtgcagccggggggctccttgcgcctgtcatgcgctgcttccgggcgaggttttaccagctactacatgggctggttccgccaggcccccggcaaggagcgcgagttcgtcagcgcagtgatttttcccgagggctacaggtattacgcggacagtgtgaaaggccgcttcaccatctcgcgggacaactccaagaacacgctttacctgcagatgaattccctcaagcctgaagatacagccgtgtactactgtgccaagtacaccggcttcggagaggacgcgtaccgttattggggccaaggcacccaggtcactgtttcttct

SEQ ID NO: 3371 - DNA, 759 bp, synthetic construct
  misc_feature 1..759: note = Synthetic
  source 1..759: mol_type = other DNA
gaggtgcagctgctggaatctggcggaggcctggtgcaacctggaggatctctgagactgagctgtgccgcttctggcctcacattcagcatccacacagttggctggtttagacaggcccctggcaaagagcgggaattcgtgtccgccgccctgggcagcggcggacgcccatactatagagatagcgtgaagggcagattcaccatcagccgggacaatagcaagaacaccctgtacctgcagatgaacagcctgaagcccgaggacaccgccgtgtactactgctacgtggacgtgggcaccggcctgtactacggctactggggccagggcacacaggtgaccgtctccagcggtggcggtggctcgggcggtggtgggtcgggtggcggcggatctgaggtgcagctgctggagagcggaggcggtctcgtgcagccgggagggagtctacgcctgtcgtgtgccgcaagcggtctcacgttttcaattcacaccgtgggctggttccgccaggccccaggcaaggagcgcgagttcgtcagcgcggctttgggctccggtgggcgtccctattacagggattctgtgaagggccgcttcaccatctctcgggacaactccaaaaacactctgtacctgcagatgaattccctgaagcctgaagacaccgccgtgtactactgctacgtggacgtagggactggcctttactacggctattggggccaaggcacccaggtcacagtttcgtcc

SEQ ID NO: 3372 - DNA, 777 bp, synthetic construct
  misc_feature 1..777: note = Synthetic
  source 1..777: mol_type = other DNA
gaggtgcagctgctggaaagcggcggaggcctggtccaacctggaggaagcctgagactgtcttgtgccgccagcggcagaatcttcagctcttattttatgggctggttccggcaggcccctggcaaggaaagagagttcgtgtccgcccacatcagcagcgagggctctacatactaccgggacagcgtgaaaggcaggttcaccatctccagagataatagcaagaacaccctgtacctgcagatgaacagcctcaagcccgaggacaccgccgtgtactactgcgctgctagagaatacgccgacacccagcggggcgagtacgcctactggggccagggcacacaggtgaccgtgtccagcggtggcggtggctcgggcggtggtgggtcgggtggcggcggatctgaggtgcagctgctggagagcggcggaggtttggtgcagccggggggttctcttcgcctgagttgcgccgctagcggacgcattttttcaagctatttcatgggctggttccgccaggcccccggcaaggagcgagagttcgtcagcgcgcacatctcttccgagggctccacctactacagggattctgtgaagggccgcttcaccatctcgcgggacaactccaagaacacgctgtacctgcagatgaattccctcaaacctgaagacactgccgtgtactactgtgccgctcgcgagtacgcggacacccaacgtggggagtacgcatattggggccagggcacccaggtcacagtttcgtcc

SEQ ID NO: 3373 - DNA, 747 bp, synthetic construct
  misc_feature 1..747: note = Synthetic
  source 1..747: mol_type = other DNA
gaggtgcagctgctggaaagcggaggcggcctggttcaacctggaggatctctgagactgagctgcgccgctagcggctctatcgtgtccagctacgccatgggctggtttagacaggcccctggcaaagagcgggaattcgtgtcctccgccatcggcaagggcggcgtcacaatctacgccgacagcgtgaagggcagattcaccatcagcagagataatagcaagaacaccctgtacctccagatgaacagcctgaagcccgaggacaccgccgtgtactattgtgctacagatgagagcacctaccgggactactggggccagggcacacaggtgaccgtgtctagcggtggcggtggctcgggcggtggtgggtcgggtggcggcggatctgaggtgcagctgctggagagcggagggggactggtgcagccgggcggctcccttcgtttgtcatgcgcagcttccggttctatcgtgtccagctacgccatgggctggttccgccaggcccccggcaaggagcgcgagttcgtctcttccgccatcggtaaaggtggggttacaatttacgcggacagcgtgaagggccgctttaccatctctcgggacaactccaagaacacgctgtacctgcagatgaattccctcaagcctgaagacaccgccgtgtactactgtgccaccgacgagagtacttacagggattattggggccaaggcacccaggtcactgtatcgtcg

SEQ ID NO: 3374 - DNA, 741 bp, synthetic construct
  misc_feature 1..741: note = Synthetic
  source 1..741: mol_type = other DNA
gaggtgcagctgctggaaagcggcggaggcctggtgcaacctggcggcagcctgagactgagctgcgctgcttctggatctctgtttcaggtcgagcacatcggctggttcagacaggcccctggcaaggaacgggacttcgtgtccgcccaggttacaggcggaggctacacctactacgccgacagcgtgaaaggcagattcaccatcagcagagataatagcaagaacaccctgtacctgcagatgaacagcctgaagcccgaggacaccgccgtgtactattgttacgtgcggctcgtggaagaggcctactggggccagggcacacaggtgaccgtgtccagcggtggcggtggctcgggcggtggtgggtcgggtggcggcggatctgaggtgcagctgctggagagcggtggagggctggtgcagccggggggctccctccgcctgagttgtgccgcttccggttctctgtttcaggtggagcacatcggttggttccgccaggcccccggcaaggagcgtgatttcgtctcggcacaagtcactggaggcggctacacctattacgcggacagcgtgaagggccgcttcaccatctctcgggacaactccaagaacacgctttacctgcagatgaattcgctaaaacctgaagacaccgccgtatactactgctacgtgaggttggtggaggaggcttattggggccagggcacccaggttacagtctcctca

SEQ ID NO: 3375 - DNA, 777 bp, synthetic construct
  misc_feature 1..777: note = Synthetic
  source 1..777: mol_type = other DNA
gaggtgcagctgctggaaagcggcggcggactggtgcaacctggcggatctctgcggttgtcttgtgctgccagcggaacaaccttcgcctctagctttatgggctggttccggcaggcccctggcaaggaaagagagttcgtgtccgccatcgtgttcccaggcggcagcacatactatgccgacagcgtgaagggcagattcaccatcagcagagataattcaaagaacaccctgtacctgcagatgaacagcctgaaacccgaggacaccgccgtgtactactgcgccgctagacggtacgagctggtcgacagactggaatacgcctactggggccagggcacacaggtgaccgtgtccagcggtggcggtggctcgggcggtggtgggtcgggtggcggcggatctgaggtgcagctgctggaatctggaggcgggcttgtacagccgggcggttctctccgtctatcatgcgccgcgtcggggactacatttgcttccagttttatgggctggttccgccaggcccccggcaaggagcgggagttcgtcagcgccatcgtgttccctggtggctccacctactacgcggacagcgtgaagggccgattcaccatctctagggacaactccaaaaacacgctgtacctgcagatgaatagcttgaagcccgaggacaccgccgtttattactgtgctgctcgccgctacgagctggtggatcgcctggagtacgcatattggggccaaggcacccaggtcaccgtgtcgtcc

SEQ ID NO: 3376 - DNA, 747 bp, synthetic construct
  misc_feature 1..747: note = Synthetic
  source 1..747: mol_type = other DNA
gaggtgcagctgctggaaagcggcggcggactggttcagcctggaggaagcctgagactgtcttgtgccgcctctggctctgtgttcagcagctttaccatcggctggttccggcaggcccccggcaaggagagagaattcgtgtccgccatcgtgacaagcaccggcagcacatactacgctgatagcgtcaagggcagattcacaatcagcagagacaatagcaaaaacaccctgtacctgcaaatgaactccctcaagcctgaggacaccgccgtgtactactgcaacgtgcggacccaggaggactactactattggggccagggcacccaggtgaccgtgtccagcggtggcggtggctcgggcggtggtgggtcgggtggcggcggatctgaggtgcagctgctggagagcggaggtggactggtgcagccgggggggtctttgaggctgagttgtgctgcttctggctccgtgttttcatccttcaccatcggttggttccgccaggcccccggcaaggagcgggagttcgtcagcgcaattgttacttcgaccggctccacttactacgcggacagcgtaaagggccgcttcacaatctcgcgtgacaactccaagaacacgctttacctgcagatgaattccctcaaacctgaagacaccgccgtgtactactgcaacgtgcgcacccaggaggattattactattggggccaaggcacccaggtcaccgtgagctct

SEQ ID NO: 3377 - DNA, 777 bp, synthetic construct
  misc_feature 1..777: note = Synthetic
  source 1..777: mol_type = other DNA
gaggtgcagctgctggaaagcggaggaggcctggtccagccaggcggctccctgagactgagctgtgccgcttctggcagcatcttcggcagccactttatgggctggttccggcaggcccctggcaaagagcgggaattcgtgtccgccgctgtgaccagcggcggatctacatattacgccgacagcgtgaagggcagattcaccatcagcagagataattctaagaacaccctgtacctgcagatgaacagcctcaagcccgaggacaccgccgtgtactactgcgccgccagaacctaccagagcacctaccaacctgagtacgcctactggggccagggcacacaggtgacagtgtccagcggtggcggtggctcgggcggtggtgggtcgggtggcggcggatctgaggtgcagctgctggagagcggaggtgggctggtgcagccggggggttctttgcgcctgtcatgcgccgcatctggctccatcttcggaagtcactttatgggctggttccgccaggcccccggcaaggagagggagttcgtctccgccgccgtgacctccggtggctccacttattacgcggacagcgttaagggccgcttcaccatttctcgtgacaactccaagaacacgctttacctgcagatgaattccctcaaacctgaagatacagccgtgtactactgtgctgctcggacctaccagagcacttaccaaccagagtacgcctattggggccagggcacccaggtcaccgtgtcgtcg

SEQ ID NO: 3378 - DNA, 789 bp, synthetic construct
  misc_feature 1..789: note = Synthetic
  source 1..789: mol_type = other DNA
gaggtgcagctgctggaaagcggcggaggcctggtccaacctggcggcagcctgagactgtcttgtgctgcttccggatctatcttcagcatcctggacatcggctggttccgccaggcccctggcaaggaacgggaattcgtgtccgcctatatcagcagcggcggatctacatactacagcgacagcgtgaaaggcagattcaccattagcagagataatagcaagaacaccctgtacctgcagatgaacagcctcaagcccgaggacaccgccgtgtactactgcgtggccacaatctttggcgatagaaccgagggccaggagcggtacgccttctggggccagggcacacaggtgaccgtgtccagcggtggcggtggctcgggcggtggtgggtcgggtggcggcggatctgaggtgcagctgctggagagcggaggagggttggtgcagccgggcgggagccttcgcctgtcatgcgccgcttctggctccattttttctatcctggacatcggttggttccgccaggcccccggcaaggagagggagttcgtcagcgcctacatctcgagcggtggctcgacctattactccgactccgtgaagggccgcttcaccatttctcgggacaactccaagaacacgctgtacctacagatgaattccctcaaacctgaagacactgcagtgtactactgcgtggctaccatctttggtgatcgtactgagggccaggagcgttacgcgttctggggccaaggcacccaggtcacagtttctagt

SEQ ID NO: 3379 - DNA, 777 bp, synthetic construct
  misc_feature 1..777: note = Synthetic
  source 1..777: mol_type = other DNA
gaggtgcagctgctggaaagcggaggcggcctggtccaaccaggcggatctctgcggctgagctgtgccgccagcggctctacaaccagcagctacttcatgggctggtttcggcaggcccctggcaaggaaagagagttcgtgtccgccatcatcacctcctccggcagcccctactacgccgacagcgtgaagggcagattcaccatcagcagagataatagcaagaacaccctgtacctccagatgaacagcctgaaacctgaggatacagccgtgtactactgcgctgctagacggtacggctctagagagacagacgactacggatattggggccagggcacccaggtgaccgtgtctagcggtggcggtggctcgggcggtggtgggtcgggtggcggcggatctgaagtgcagctgctggagagcggcggcggactggtgcagccaggaggttccttgcgcctttcatgcgctgcctctggttccacaacttcgagctactttatggggtggttcagacaggccccggggaaggagagggagttcgtcagcgcaattatcacctcctctggctccccctattacgcggactcggtgaaaggccggttcaccatctctcgcgacaactccaagaacacgctctacctgcagatgaattctctgaagcctgaggacaccgccgtgtactactgtgccgctcgtcgctacggctcccgcgagactgatgactacggttattggggccaaggcacccaggtcaccgttagcagt

SEQ ID NO: 3380 - DNA, 783 bp, synthetic construct
  misc_feature 1..783: note = Synthetic
  source 1..783: mol_type = other DNA
gaggtgcagctgctggaaagcggcggcggcctggtgcaacctggaggctctctgcggctgagctgcgctgcttctggctccgtctttagcagctacagcatgtggttcagacaggcccctggcaaggaaagagagttcgtgtccgccattatcaccagcggcggcagcacctactacgccgatagcgtgaaaggcagattcaccatcagccgggacaatagcaagaacaccctgtacctgcagatgaacagcctcaagcccgaggacaccgccgtgtactattgtgtggccgtgtacggcatcggcacaggccagtacatcggaacatacgacatctggggacagggcacacaggtgaccgtgtctagcggtggcggtggctcgggcggtggtgggtcgggtggcggcggatctgaggtgcagctgctggagagcgggggtggtctggtgcagccgggcgggtcgttgcgtctgtcatgcgccgcttctggctccgtattttctagctactccatgtggttccgccaggcccccggcaaggagcgcgagttcgtctccgccatcatcaccagcggaggctccacttactacgcggacagtgtgaagggccgcttcaccatttctcgggacaactccaagaacacgctttacctgcagatgaattccctcaaacctgaagatactgccgtttattactgcgtggcagtgtacggcatcggtacaggacaatatattgggacctacgacatctggggccagggcacccaggtcaccgtgtcgtcc

SEQ ID NO: 3381 - DNA, 771 bp, synthetic construct
  misc_feature 1..771: note = Synthetic
  source 1..771: mol_type = other DNA
gaggtgcagctgctggaaagcggaggaggcctggtccaacctggaggatctctgcggctgagctgcgccgcttctggcagcctgctcagcatctacgacatgggctggtttagacaggcccctggcaaggaacgggaattcgtgtccgccagaatcggcaaaggcggctctacatactacgccgacagcgtgaagggcagattcaccatcagcagagataatagcaagaacaccctgtacctgcagatgaacagcctgaagcccgaggacacagccgtgtactattgtgctgtgctggtgggcgagggcgagagctacggctaccactactggggccagggcacccaggtgaccgtgtccagcggtggcggtggctcgggcggtggtgggtcgggtggcggcggatctgaggtgcaactgctggagagtgggggtggattggtgcagccgggtggctccctccgcctgtcatgcgccgcttctggctcccttctcagcatttacgacatggggtggttccgccaggcccccggcaaggagcgggagttcgtctccgcccgcatcggtaaaggaggctcgacctactacgcggactccgtgaagggcaggtttaccatctctcgtgacaactccaagaacacgctatacctgcagatgaattcgctgaagcctgaagatactgcagtttattactgtgccgtgctggtaggggagggcgagagctacggctaccactattggggccagggcacccaggtcaccgtgtcctct

SEQ ID NO: 3382 - DNA, 783 bp, synthetic construct
  misc_feature 1..783: note = Synthetic
  source 1..783: mol_type = other DNA
gaggtgcagctgctggaaagcggcggcggactggtccaacctggaggcagcctgagactgtcttgtgccgccagcggcatcggcctctccatctactttatgggctggttccggcaggcccctggcaaggaacgggaattcgtgtccgccatcatcagcagcagcggatctacctactacgccgacagcgtgaaaggcagattcaccatctctagagataatagcaagaacaccctgtacctgcagatgaacagcctgaagcccgaggacaccgccgtgtactactgcgctgctagaaccggctacagcgagtacgagcaggaggactacggctattggggccagggcacacaggtgacagtgtccagcggtggcggtggctcgggcggtggtgggtcgggtggcggcggatctgaggtgcagctgctggagagcggaggtgggctggtgcagccgggaggttctctacggttgtcatgcgccgcgtctggcatcggtcttagcatttactttatgggctggttccgccaggcccccgggaaggagagggagttcgtctcggccatcatctcttcttccggctccacttattacgcggacagcgttaagggccgcttcaccatctcgcgtgacaactccaagaacacgctgtacctgcagatgaattccctcaaacctgaagatacagcagtgtactactgtgctgctcgcaccggctactccgagtacgagcaggaggactacggctattggggccaaggcacccaggtcaccgtgtccagt

SEQ ID NO: 3383 - DNA, 777 bp, synthetic construct
  misc_feature 1..777: note = Synthetic
  source 1..777: mol_type = other DNA
gaggtgcagctgctggaaagcggcggaggcctggtgcaacctggaggatctctcagactgagctgcgccgcttctggcagcatcttcagcagctccttcatcggctggttcagacaggcccctggcaaagagcgggaattcgtgtccgccgtgatcgcctcttctggcagcacctactacgccgacagcgtgaagggccggtttaccatcagcagagataatagcaagaacaccctgtacctgcagatgaacagcctgaagcccgaggacaccgccgtgtactattgtgctggcagattcggccagggcggcggcacagtcgagtacggctactggggccagggaacacaggtgaccgtgtccagcggtggcggtggctcgggcggtggtgggtcgggtggcggcggatctgaggtgcaactgctggagagcggcggcgggcttgtgcagccggggggctccctccggctgtcatgcgcggcctctggctccatcttcagcagctcctttatcggttggttccgccaggcccccggcaaggagcgcgagttcgtctctgcagtaattgcttcctctggttcgacttattacgcggacagtgttaaaggccgcttcaccatcagcagggacaactccaagaacacgctgtacttgcagatgaattccctgaagcctgaagatacagccgtgtactactgtgctggccgcttcggacagggcggtggtaccgtggagtacggctactggggccaggggacccaggtgaccgtctcttcg

SEQ ID NO: 3384 - DNA, 777 bp, synthetic construct
  misc_feature 1..777: note = Synthetic
  source 1..777: mol_type = other DNA
gaagtgcagctgctggaaagcggcggaggcctggtccaacctggaggatctctcagactgagctgtgccgccagcggcagagtgttcagcttctacttcatgggctggttccggcaggcccctggcaaagagcgggaatttgtgtccggcgtgatcggcaagacaggctctacatactacaccgacagcgtgaagggcagattcaccatcagcagagataatagcaagaacaccctgtacctgcagatgaacagcctgaagcccgaggacaccgccgtgtactactgcgctgcttctgagtaccagggcaccggctacggcgagtttgcctattggggccagggaacacaggtgaccgtgtccagcggtggcggtggctcgggcggtggtgggtcgggtggcggcggatctgaggtacagctgctggagagcgggggaggactggtgcagccgggcggcagccttaggctgtcttgcgcagcttccggtcgcgtgttctccttttatttcatggggtggttccgccaggcccctggtaaggagcgcgagttcgtctccggtgttattggcaagaccggctccacttactacactgattctgtgaagggccgcttcaccatcagccgggacaactccaaaaacacgttgtacctgcagatgaattctctcaagcccgaggacaccgccgtgtactactgtgctgccagtgagtaccaggggacaggctacggcgaatttgcctattggggccagggcacccaagtcaccgtgtcgtcg

SEQ ID NO: 3385 - DNA, 741 bp, synthetic construct
  misc_feature 1..741: note = Synthetic
  source 1..741: mol_type = other DNA
gaggtgcagctgctggaaagcggaggcggcctggtgcaacctggcggatctctgagactgagctgtgctgcttctggcagcctgttcgaggttgagcacatcggctggtttagacaggcccctggaaaagagcgggaattcgtgtccgcccaggtgaccggcggcggctacacctactatgccgacagcgtgaagggcagattcaccatcagcagagataatagcaagaacaccctgtacctgcagatgaacagcctcaagcccgaggacaccgccgtgtactactgctacgtgcggctggtcgaggaagcctactggggccagggcacacaggtgacagtgtccagcggtggcggtggctcgggcggtggtgggtcgggtggcggcggatctgaggtgcagctgctggagagcggaggcggtctcgtccaacctggcggctcccttcgtttgtcatgcgccgcttccggttctctgtttgaggtggagcacatcggttggttccgccaggcccccgggaaggagcgggagttcgtctccgcccaggtcacaggcgggggctacacctattacgcggacagtgtaaaaggacgcttcaccatttctagggacaactccaagaacacgctgtacctgcagatgaattccctcaagccggaagatactgcagtgtactactgttacgtgcgcctggtggaggaggcctattggggccagggcacccaggttaccgtgagctcg

SEQ ID NO: 3386 - DNA, 789 bp, synthetic construct
  misc_feature 1..789: note = Synthetic
  source 1..789: mol_type = other DNA
gaggtgcagctgctggaaagcggcggaggactggtccagcctggcggcagcctgcggctgagctgcgccgcctctggcagaatcttcggcgagtacttcatcggatggtttcggcaggccccaggaaaagagcgcgagttcgtgtccgccattatcacaggcagcggcatcacccactacgccgacagcgtgaagggcagattcaccatctccagagacaactctaagaataccctgtacctgcagatgaacagcctcaagcctgaagatacagccgtgtactactgtgctgctagaacagactacaccaccggccaagagctgcccgaatatggctactggggccagggcacccaggtgaccgtgagcagcggtggcggtggctcgggcggtggtgggtcgggtggcggcggatctgaggtgcagctgctggagagcggtggtggtctggtgcagccgggggggagcctacggttgtcatgcgcggcaagtgggcgcatcttcggcgagtacttcatcggatggttccgccaggccccaggcaaggagagggagttcgtctcggccatcattaccggctccggcatcactcactacgcggacagcgttaagggccgcttcaccatctctcgcgacaactccaagaacacgctttacctgcagatgaattccctcaaacctgaagacaccgccgtgtactactgtgctgctcgtactgattacaccacaggacaggagctgcccgagtacggctattggggccaaggcacccaggtcaccgtgtcctct

SEQ ID NO: 3387 - DNA, 759 bp, synthetic construct
  misc_feature 1..759: note = Synthetic
  source 1..759: mol_type = other DNA
gaggtgcagctgctggaaagcggcggcggcctcgtgcaacctggcggaagcctgagactgagctgcgccgcttctggctctatcgagagcatctacttcatcggctggttcagacaggcccctggcaaggaacgggaattcgtgtccgccgagtttatccccggaggcagcaccgtctacagcgacagcgtgaagggcagattcaccatcagcagagataacagcaagaacaccctgtacctgcagatgaacagcctgaaaccagaggacaccgccgtgtactactgtaatgccggcctggacgagggccggtactatacatactggggccagggcacacaggtgaccgtgtctagcggtggcggtggctcgggcggtggtgggtcgggtggcggcggatctgaggtgcagctgctggagagtggaggagggctggtgcagccagggggttctttgcgcctgagctgtgctgcttccggctccattgagagcatctactttatcggttggttccgccaggcccccggcaaggagagggagttcgtctcggcggagttcatcccgggcggctccactgtttacagcgattctgtgaagggccgcttcaccatctctcgggacaactccaagaacacgctatacctgcaaatgaacagccttaaacctgaagacaccgccgtgtactactgcaatgcaggtctcgacgagggccgttattacacctattggggccagggcacccaggtcacagtgtcgtcc

SEQ ID NO: 3388 - DNA, 741 bp, synthetic construct
  misc_feature 1..741: note = Synthetic
  source 1..741: mol_type = other DNA
gaggttcagctgctggaaagcggaggcggcctggtgcaacctggcggcagcctgcggctgagctgtgccgcttctggcatcgaggtgtctagcagcgtggtcggctggtttagacaggcccctggcaaggaaagagagttcgtgtccgccagcggcgtgggcggatctacatactacgctgatagcgtgaaaggcagattcaccatcagccgggacaatagcaagaacaccctgtacctgcagatgaacagcctcaagcccgaggacaccgccgtgtattactgctacgccgtgtacctgaccatctacacatactggggacagggcacacaggtgaccgtgtcctccggtggcggtggctcgggcggtggtgggtcgggtggcggcggatctgaagtgcagctgctggagagcggaggtgggctggtgcagccggggggttctcttcgtctatcatgcgccgcttctggcattgaggtgagcagttccgtggtgggttggttccggcaggcccctggcaaggagcgcgagttcgtctccgcctccggagtaggcggctccacatactacgcggacagcgttaaaggccgctttactatctctcgcgataactccaagaacactctgtacctgcagatgaattccctcaagcccgaggacaccgccgtgtactattgttacgcagtctacttgacgatctacacctattggggccaaggcacccaggtcaccgtgtcgtcg

SEQ ID NO: 3389 - DNA, 747 bp, synthetic construct
  misc_feature 1..747: note = Synthetic
  source 1..747: mol_type = other DNA
gaggtgcagctcctggaaagcggcggaggcctggtgcaacctggaggctctctgagactgtcttgtgccgctagcggatttaccatctccagatacgccatggcctggttccggcaggcccctggcaaggaaagagagttcgtgtccggcagcatcttcgtgggcggcggcacatactatagagatagcgtgaaaggccgcttcaccatcagccgggacaatagcaagaacaccctgtacctgcagatgaacagcctgaagcccgaggacaccgccgtgtactactgctacgctacagtcggcgacagctactactactggggccagggcacccaggtgacagtgtctagcggtggcggtggctcgggcggtggtgggtcgggtggcggcggatctgaggtgcagctgctggagagcggtggagggctggtgcagccgggaggctccctccgcttgtcatgcgctgcaagtggctttactatttcccgctacgccatggcttggttcaggcaagcccccggcaaggagcgggagttcgttagcggctccatcttcgtcggtggtggcacctactaccgtgattctgtgaagggccgcttcaccatctctcgcgacaactccaagaacacgctttacctgcagatgaattctctgaaacctgaagacactgccgtgtactactgttacgcgacagtaggggacagctattactattggggccagggcacccaggtcaccgtgtcgtcg

SEQ ID NO: 3390 - DNA, 741 bp, synthetic construct
  misc_feature 1..741: note = Synthetic
  source 1..741: mol_type = other DNA
gaggtgcagctgctggaaagcggcggaggcctggtgcaacctggaggcagcctgagactgagctgcgctgcttctggcagcctgttcagcgtggaacacatcggctggtttagacaggcccctggcaaagagcgggagttcgtgtccgcccaggttacaggcggcggctacacctactacgccgacagcgtgaagggcagattcaccatcagcagagataatagcaagaacaccctgtacctgcagatgaacagcctcaagcccgaggacaccgccgtgtactattgttacgtgcggctggtcgaggaagcctactggggccagggcacccaggtgacagtgtcttctggtggcggtggctcgggcggtggtgggtcgggtggcggcggatctgaggtgcagctgctggagagcggagggggattggtgcagccggggggctcccttcgtctaagttgcgccgcttccggttctctgttttcagtggagcacatcggttggttccgccaggcccccggcaaggagcgggagttcgtcagcgcacaagtcaccggcggtggctacacctattacgcggacagcgttaagggccgcttcaccatttctagggacaactccaagaacacgctgtacctgcagatgaattccctcaaacctgaagatacagccgtgtactactgttacgtgcgcctggtggaggaggcttattggggccagggcacccaggtcactgtatcgtcg

SEQ ID NO: 3391 - DNA, 747 bp, synthetic construct
  misc_feature 1..747: note = Synthetic
  source 1..747: mol_type = other DNA
gaggtgcagctgctggaaagcggaggcggcctggtccaacctggaggcagcctgagactgagctgcgccgctagcggctttatcttcagcatctacgacatgggctggttccggcaggcccctggcaaagagcgggaattcgtgtccgccatctctacaacaggcggatctatctactacgccgacagcgtgaagggcagattcaccatcagcagagataacagcaagaacaccctgtacctgcagatgaactccctcaagcccgaggacaccgccgtgtactattgtaatgctgatccactggagagctacggctactggggccagggcacccaggtgaccgtgtctagcggtggcggtggctcgggcggtggtgggtcgggtggcggcggatctgaggtgcaactgctggagagtgggggagggctggtgcagccgggaggctccctccgtctttcgtgtgctgcttccggcttcatcttttcaatttacgacatgggctggttccgccaggcccccggcaaggagcgcgagttcgtctctgccatctcgaccacaggtggttccatctattacgcggacagcgtgaagggtcgcttcaccatctctcgggacaactccaagaacacgctatacctgcagatgaacagcttgaaacctgaagatactgccgtgtactactgcaatgcagaccccctggagagctacggctattggggccagggcacccaggtcaccgtttcttcc

SEQ ID NO: 3392 - DNA, 759 bp, synthetic construct
  misc_feature 1..759: note = Synthetic
  source 1..759: mol_type = other DNA
gaggtgcagctgctggaatctggcggcggactggtgcaacctggcggcagcctgagactgagctgcgccgcttctggctctgtgttcagctcctactttatcggctggttccggcaggcccctggaaaggaaagagagttcgtgtccgccgtgatctccagcagcggaagcacctactacgccgacagcgtgaaaggcagattcaccatcagccgggacaatagcaagaacaccctgtacctgcagatgaacagcctcaagcccgaggacacagctgtctactattgtgtggccagagaagatgtgggcgagccatacggctactggggccagggcacacaggtgaccgtgtctagcggtggcggtggctcgggcggtggtgggtcgggtggcggcggatctgaggtgcagctgctggagagcggcggcggtctggtgcagccgggaggctccctccgcctgtcatgcgccgcttccggatcggtgttttctagctacttcatcggttggttccgccaggcccccgggaaggagcgggagttcgtctccgccgtgatttcttcttctggctccacctactacgcggacagcgtgaagggtcgcttcaccatctcgcgtgacaactccaaaaacacgctttacctgcagatgaattccttgaagcctgaagatacagccgtgtactactgcgtggcaagggaggacgtgggggagccctatggctattggggccaaggcacccaggtcactgtatccagt

SEQ ID NO: 3393 - protein, 359 aa, synthetic construct
  REGION 1..359: note = Synthetic
MALPVTALLLPLALLLHAARPEVQLLESGGGLVQPGGSLRLSCAASGRGFTSYYMGWFRQAPGKEREFVSAVIFPEGYRYYADSVKGRFTISRDNSKNTLYLQMNSLKPEDTAVYYCAKYTGFGEDAYRYWGQGTQVTVSSTTTPAPRPPTPAPTIASQPLSLRPEACRPAAGGAVHTRGLDFACDIYIWAPLAGTCGVLLLSLVITLYCRRDQRLPPDAHKPPGGGSFRTPIQEEQADAHSTLAKIRVKFSRSADAPAYQQGQNQLYNELNLGRREEYDVLDKRRGRDPEMGGKPRRKNPQEGLYNELQKDKMAEAYSEIGMKGERRRGKGHDGLYQGLSTATKDTYDALHMQALPPR

SEQ ID NO: 3394 - protein, 358 aa, synthetic construct
  REGION 1..358: note = Synthetic
MALPVTALLLPLALLLHAARPEVQLLESGGGLVQPGGSLRLSCAASGLTFSIHTVGWFRQAPGKEREFVSAALGSGGRPYYRDSVKGRFTISRDNSKNTLYLQMNSLKPEDTAVYYCYVDVGTGLYYGYWGQGTQVTVSSTTTPAPRPPTPAPTIASQPLSLRPEACRPAAGGAVHTRGLDFACDIYIWAPLAGTCGVLLLSLVITLYCRRDQRLPPDAHKPPGGGSFRTPIQEEQADAHSTLAKIRVKFSRSADAPAYQQGQNQLYNELNLGRREEYDVLDKRRGRDPEMGGKPRRKNPQEGLYNELQKDKMAEAYSEIGMKGERRRGKGHDGLYQGLSTATKDTYDALHMQALPPR

SEQ ID NO: 3395 - protein, 361 aa, synthetic construct
  REGION 1..361: note = Synthetic
MALPVTALLLPLALLLHAARPEVQLLESGGGLVQPGGSLRLSCAASGRIFSSYFMGWFRQAPGKEREFVSAHISSEGSTYYRDSVKGRFTISRDNSKNTLYLQMNSLKPEDTAVYYCAAREYADTQRGEYAYWGQGTQVTVSSTTTPAPRPPTPAPTIASQPLSLRPEACRPAAGGAVHTRGLDFACDIYIWAPLAGTCGVLLLSLVITLYCRRDQRLPPDAHKPPGGGSFRTPIQEEQADAHSTLAKIRVKFSRSADAPAYQQGQNQLYNELNLGRREEYDVLDKRRGRDPEMGGKPRRKNPQEGLYNELQKDKMAEAYSEIGMKGERRRGKGHDGLYQGLSTATKDTYDALHMQALPPR

SEQ ID NO: 3396 - protein, 356 aa, synthetic construct
  REGION 1..356: note = Synthetic
MALPVTALLLPLALLLHAARPEVQLLESGGGLVQPGGSLRLSCAASGSIVSSYAMGWFRQAPGKEREFVSSAIGKGGVTIYADSVKGRFTISRDNSKNTLYLQMNSLKPEDTAVYYCATDESTYRDYWGQGTQVTVSSTTTPAPRPPTPAPTIASQPLSLRPEACRPAAGGAVHTRGLDFACDIYIWAPLAGTCGVLLLSLVITLYCRRDQRLPPDAHKPPGGGSFRTPIQEEQADAHSTLAKIRVKFSRSADAPAYQQGQNQLYNELNLGRREEYDVLDKRRGRDPEMGGKPRRKNPQEGLYNELQKDKMAEAYSEIGMKGERRRGKGHDGLYQGLSTATKDTYDALHMQALPPR

SEQ ID NO: 3397 - protein, 355 aa, synthetic construct
  REGION 1..355: note = Synthetic
MALPVTALLLPLALLLHAARPEVQLLESGGGLVQPGGSLRLSCAASGSLFQVEHIGWFRQAPGKERDFVSAQVTGGGYTYYADSVKGRFTISRDNSKNTLYLQMNSLKPEDTAVYYCYVRLVEEAYWGQGTQVTVSSTTTPAPRPPTPAPTIASQPLSLRPEACRPAAGGAVHTRGLDFACDIYIWAPLAGTCGVLLLSLVITLYCRRDQRLPPDAHKPPGGGSFRTPIQEEQADAHSTLAKIRVKFSRSADAPAYQQGQNQLYNELNLGRREEYDVLDKRRGRDPEMGGKPRRKNPQEGLYNELQKDKMAEAYSEIGMKGERRRGKGHDGLYQGLSTATKDTYDALHMQALPPR

SEQ ID NO: 3398 - protein, 361 aa, synthetic construct
  REGION 1..361: note = Synthetic
MALPVTALLLPLALLLHAARPEVQLLESGGGLVQPGGSLRLSCAASGTTFASSFMGWFRQAPGKEREFVSAIVFPGGSTYYADSVKGRFTISRDNSKNTLYLQMNSLKPEDTAVYYCAARRYELVDRLEYAYWGQGTQVTVSSTTTPAPRPPTPAPTIASQPLSLRPEACRPAAGGAVHTRGLDFACDIYIWAPLAGTCGVLLLSLVITLYCRRDQRLPPDAHKPPGGGSFRTPIQEEQADAHSTLAKIRVKFSRSADAPAYQQGQNQLYNELNLGRREEYDVLDKRRGRDPEMGGKPRRKNPQEGLYNELQKDKMAEAYSEIGMKGERRRGKGHDGLYQGLSTATKDTYDALHMQALPPR

SEQ ID NO: 3399 - protein, 356 aa, synthetic construct
  REGION 1..356: note = Synthetic
MALPVTALLLPLALLLHAARPEVQLLESGGGLVQPGGSLRLSCAASGSVFSSFTIGWFRQAPGKEREFVSAIVTSTGSTYYADSVKGRFTISRDNSKNTLYLQMNSLKPEDTAVYYCNVRTQEDYYYWGQGTQVTVSSTTTPAPRPPTPAPTIASQPLSLRPEACRPAAGGAVHTRGLDFACDIYIWAPLAGTCGVLLLSLVITLYCRRDQRLPPDAHKPPGGGSFRTPIQEEQADAHSTLAKIRVKFSRSADAPAYQQGQNQLYNELNLGRREEYDVLDKRRGRDPEMGGKPRRKNPQEGLYNELQKDKMAEAYSEIGMKGERRRGKGHDGLYQGLSTATKDTYDALHMQALPPR

SEQ ID NO: 3400 - protein, 361 aa, synthetic construct
  REGION 1..361: note = Synthetic
MALPVTALLLPLALLLHAARPEVQLLESGGGLVQPGGSLRLSCAASGSIFGSHFMGWFRQAPGKEREFVSAAVTSGGSTYYADSVKGRFTISRDNSKNTLYLQMNSLKPEDTAVYYCAARTYQSTYQPEYAYWGQGTQVTVSSTTTPAPRPPTPAPTIASQPLSLRPEACRPAAGGAVHTRGLDFACDIYIWAPLAGTCGVLLLSLVITLYCRRDQRLPPDAHKPPGGGSFRTPIQEEQADAHSTLAKIRVKFSRSADAPAYQQGQNQLYNELNLGRREEYDVLDKRRGRDPEMGGKPRRKNPQEGLYNELQKDKMAEAYSEIGMKGERRRGKGHDGLYQGLSTATKDTYDALHMQALPPR

SEQ ID NO: 3401 - protein, 363 aa, synthetic construct
  REGION 1..363: note = Synthetic
MALPVTALLLPLALLLHAARPEVQLLESGGGLVQPGGSLRLSCAASGSIFSILDIGWFRQAPGKEREFVSAYISSGGSTYYSDSVKGRFTISRDNSKNTLYLQMNSLKPEDTAVYYCVATIFGDRTEGQERYAFWGQGTQVTVSSTTTPAPRPPTPAPTIASQPLSLRPEACRPAAGGAVHTRGLDFACDIYIWAPLAGTCGVLLLSLVITLYCRRDQRLPPDAHKPPGGGSFRTPIQEEQADAHSTLAKIRVKFSRSADAPAYQQGQNQLYNELNLGRREEYDVLDKRRGRDPEMGGKPRRKNPQEGLYNELQKDKMAEAYSEIGMKGERRRGKGHDGLYQGLSTATKDTYDALHMQALPPR

SEQ ID NO: 3402 - protein, 361 aa, synthetic construct
  REGION 1..361: note = Synthetic
MALPVTALLLPLALLLHAARPEVQLLESGGGLVQPGGSLRLSCAASGSTTSSYFMGWFRQAPGKEREFVSAIITSSGSPYYADSVKGRFTISRDNSKNTLYLQMNSLKPEDTAVYYCAARRYGSRETDDYGYWGQGTQVTVSSTTTPAPRPPTPAPTIASQPLSLRPEACRPAAGGAVHTRGLDFACDIYIWAPLAGTCGVLLLSLVITLYCRRDQRLPPDAHKPPGGGSFRTPIQEEQADAHSTLAKIRVKFSRSADAPAYQQGQNQLYNELNLGRREEYDVLDKRRGRDPEMGGKPRRKNPQEGLYNELQKDKMAEAYSEIGMKGERRRGKGHDGLYQGLSTATKDTYDALHMQALPPR

SEQ ID NO: 3403 - protein, 362 aa, synthetic construct
  REGION 1..362: note = Synthetic
MALPVTALLLPLALLLHAARPEVQLLESGGGLVQPGGSLRLSCAASGSVFSSYSMWFRQAPGKEREFVSAIITSGGSTYYADSVKGRFTISRDNSKNTLYLQMNSLKPEDTAVYYCVAVYGIGTGQYIGTYDIWGQGTQVTVSSTTTPAPRPPTPAPTIASQPLSLRPEACRPAAGGAVHTRGLDFACDIYIWAPLAGTCGVLLLSLVITLYCRRDQRLPPDAHKPPGGGSFRTPIQEEQADAHSTLAKIRVKFSRSADAPAYQQGQNQLYNELNLGRREEYDVLDKRRGRDPEMGGKPRRKNPQEGLYNELQKDKMAEAYSEIGMKGERRRGKGHDGLYQGLSTATKDTYDALHMQALPPR

SEQ ID NO: 3404 - protein, 360 aa, synthetic construct
  REGION 1..360: note = Synthetic
MALPVTALLLPLALLLHAARPEVQLLESGGGLVQPGGSLRLSCAASGSLLSIYDMGWFRQAPGKEREFVSARIGKGGSTYYADSVKGRFTISRDNSKNTLYLQMNSLKPEDTAVYYCAVLVGEGESYGYHYWGQGTQVTVSSTTTPAPRPPTPAPTIASQPLSLRPEACRPAAGGAVHTRGLDFACDIYIWAPLAGTCGVLLLSLVITLYCRRDQRLPPDAHKPPGGGSFRTPIQEEQADAHSTLAKIRVKFSRSADAPAYQQGQNQLYNELNLGRREEYDVLDKRRGRDPEMGGKPRRKNPQEGLYNELQKDKMAEAYSEIGMKGERRRGKGHDGLYQGLSTATKDTYDALHMQALPPR

SEQ ID NO: 3405 - protein, 362 aa, synthetic construct
  REGION 1..362: note = Synthetic
MALPVTALLLPLALLLHAARPEVQLLESGGGLVQPGGSLRLSCAASGIGLSIYFMGWFRQAPGKEREFVSAIISSSGSTYYADSVKGRFTISRDNSKNTLYLQMNSLKPEDTAVYYCAARTGYSEYEQEDYGYWGQGTQVTVSSTTTPAPRPPTPAPTIASQPLSLRPEACRPAAGGAVHTRGLDFACDIYIWAPLAGTCGVLLLSLVITLYCRRDQRLPPDAHKPPGGGSFRTPIQEEQADAHSTLAKIRVKFSRSADAPAYQQGQNQLYNELNLGRREEYDVLDKRRGRDPEMGGKPRRKNPQEGLYNELQKDKMAEAYSEIGMKGERRRGKGHDGLYQGLSTATKDTYDALHMQALPPR

SEQ ID NO: 3406 - protein, 361 aa, synthetic construct
  REGION 1..361: note = Synthetic
MALPVTALLLPLALLLHAARPEVQLLESGGGLVQPGGSLRLSCAASGSIFSSSFIGWFRQAPGKEREFVSAVIASSGSTYYADSVKGRFTISRDNSKNTLYLQMNSLKPEDTAVYYCAGRFGQGGGTVEYGYWGQGTQVTVSSTTTPAPRPPTPAPTIASQPLSLRPEACRPAAGGAVHTRGLDFACDIYIWAPLAGTCGVLLLSLVITLYCRRDQRLPPDAHKPPGGGSFRTPIQEEQADAHSTLAKIRVKFSRSADAPAYQQGQNQLYNELNLGRREEYDVLDKRRGRDPEMGGKPRRKNPQEGLYNELQKDKMAEAYSEIGMKGERRRGKGHDGLYQGLSTATKDTYDALHMQALPPR

SEQ ID NO: 3407 - protein, 361 aa, synthetic construct
  REGION 1..361: note = Synthetic
MALPVTALLLPLALLLHAARPEVQLLESGGGLVQPGGSLRLSCAASGRVFSFYFMGWFRQAPGKEREFVSGVIGKTGSTYYTDSVKGRFTISRDNSKNTLYLQMNSLKPEDTAVYYCAASEYQGTGYGEFAYWGQGTQVTVSSTTTPAPRPPTPAPTIASQPLSLRPEACRPAAGGAVHTRGLDFACDIYIWAPLAGTCGVLLLSLVITLYCRRDQRLPPDAHKPPGGGSFRTPIQEEQADAHSTLAKIRVKFSRSADAPAYQQGQNQLYNELNLGRREEYDVLDKRRGRDPEMGGKPRRKNPQEGLYNELQKDKMAEAYSEIGMKGERRRGKGHDGLYQGLSTATKDTYDALHMQALPPR

SEQ ID NO: 3408 - protein, 355 aa, synthetic construct
  REGION 1..355: note = Synthetic
MALPVTALLLPLALLLHAARPEVQLLESGGGLVQPGGSLRLSCAASGSLFEVEHIGWFRQAPGKEREFVSAQVTGGGYTYYADSVKGRFTISRDNSKNTLYLQMNSLKPEDTAVYYCYVRLVEEAYWGQGTQVTVSSTTTPAPRPPTPAPTIASQPLSLRPEACRPAAGGAVHTRGLDFACDIYIWAPLAGTCGVLLLSLVITLYCRRDQRLPPDAHKPPGGGSFRTPIQEEQADAHSTLAKIRVKFSRSADAPAYQQGQNQLYNELNLGRREEYDVLDKRRGRDPEMGGKPRRKNPQEGLYNELQKDKMAEAYSEIGMKGERRRGKGHDGLYQGLSTATKDTYDALHMQALPPR

SEQ ID NO: 3409 - protein, 363 aa, synthetic construct
  REGION 1..363: note = Synthetic
MALPVTALLLPLALLLHAARPEVQLLESGGGLVQPGGSLRLSCAASGRIFGEYFIGWFRQAPGKEREFVSAIITGSGITHYADSVKGRFTISRDNSKNTLYLQMNSLKPEDTAVYYCAARTDYTTGQELPEYGYWGQGTQVTVSSTTTPAPRPPTPAPTIASQPLSLRPEACRPAAGGAVHTRGLDFACDIYIWAPLAGTCGVLLLSLVITLYCRRDQRLPPDAHKPPGGGSFRTPIQEEQADAHSTLAKIRVKFSRSADAPAYQQGQNQLYNELNLGRREEYDVLDKRRGRDPEMGGKPRRKNPQEGLYNELQKDKMAEAYSEIGMKGERRRGKGHDGLYQGLSTATKDTYDALHMQALPPR

SEQ ID NO: 3410 - protein, 358 aa, synthetic construct
  REGION 1..358: note = Synthetic
MALPVTALLLPLALLLHAARPEVQLLESGGGLVQPGGSLRLSCAASGSIESIYFIGWFRQAPGKEREFVSAEFIPGGSTVYSDSVKGRFTISRDNSKNTLYLQMNSLKPEDTAVYYCNAGLDEGRYYTYWGQGTQVTVSSTTTPAPRPPTPAPTIASQPLSLRPEACRPAAGGAVHTRGLDFACDIYIWAPLAGTCGVLLLSLVITLYCRRDQRLPPDAHKPPGGGSFRTPIQEEQADAHSTLAKIRVKFSRSADAPAYQQGQNQLYNELNLGRREEYDVLDKRRGRDPEMGGKPRRKNPQEGLYNELQKDKMAEAYSEIGMKGERRRGKGHDGLYQGLSTATKDTYDALHMQALPPR

SEQ ID NO: 3411 - protein, 355 aa, synthetic construct
  REGION 1..355: note = Synthetic
MALPVTALLLPLALLLHAARPEVQLLESGGGLVQPGGSLRLSCAASGIEVSSSVVGWFRQAPGKEREFVSASGVGGSTYYADSVKGRFTISRDNSKNTLYLQMNSLKPEDTAVYYCYAVYLTIYTYWGQGTQVTVSSTTTPAPRPPTPAPTIASQPLSLRPEACRPAAGGAVHTRGLDFACDIYIWAPLAGTCGVLLLSLVITLYCRRDQRLPPDAHKPPGGGSFRTPIQEEQADAHSTLAKIRVKFSRSADAPAYQQGQNQLYNELNLGRREEYDVLDKRRGRDPEMGGKPRRKNPQEGLYNELQKDKMAEAYSEIGMKGERRRGKGHDGLYQGLSTATKDTYDALHMQALPPR

SEQ ID NO: 3412 - protein, 356 aa, synthetic construct
  REGION 1..356: note = Synthetic
MALPVTALLLPLALLLHAARPEVQLLESGGGLVQPGGSLRLSCAASGFTISRYAMAWFRQAPGKEREFVSGSIFVGGGTYYRDSVKGRFTISRDNSKNTLYLQMNSLKPEDTAVYYCYATVGDSYYYWGQGTQVTVSSTTTPAPRPPTPAPTIASQPLSLRPEACRPAAGGAVHTRGLDFACDIYIWAPLAGTCGVLLLSLVITLYCRRDQRLPPDAHKPPGGGSFRTPIQEEQADAHSTLAKIRVKFSRSADAPAYQQGQNQLYNELNLGRREEYDVLDKRRGRDPEMGGKPRRKNPQEGLYNELQKDKMAEAYSEIGMKGERRRGKGHDGLYQGLSTATKDTYDALHMQALPPR

SEQ ID NO: 3413 - protein, 355 aa, synthetic construct
  REGION 1..355: note = Synthetic
MALPVTALLLPLALLLHAARPEVQLLESGGGLVQPGGSLRLSCAASGSLFSVEHIGWFRQAPGKEREFVSAQVTGGGYTYYADSVKGRFTISRDNSKNTLYLQMNSLKPEDTAVYYCYVRLVEEAYWGQGTQVTVSSTTTPAPRPPTPAPTIASQPLSLRPEACRPAAGGAVHTRGLDFACDIYIWAPLAGTCGVLLLSLVITLYCRRDQRLPPDAHKPPGGGSFRTPIQEEQADAHSTLAKIRVKFSRSADAPAYQQGQNQLYNELNLGRREEYDVLDKRRGRDPEMGGKPRRKNPQEGLYNELQKDKMAEAYSEIGMKGERRRGKGHDGLYQGLSTATKDTYDALHMQALPPR

SEQ ID NO: 3414 - protein, 356 aa, synthetic construct
  REGION 1..356: note = Synthetic
MALPVTALLLPLALLLHAARPEVQLLESGGGLVQPGGSLRLSCAASGFIFSIYDMGWFRQAPGKEREFVSAISTTGGSIYYADSVKGRFTISRDNSKNTLYLQMNSLKPEDTAVYYCNADPLESYGYWGQGTQVTVSSTTTPAPRPPTPAPTIASQPLSLRPEACRPAAGGAVHTRGLDFACDIYIWAPLAGTCGVLLLSLVITLYCRRDQRLPPDAHKPPGGGSFRTPIQEEQADAHSTLAKIRVKFSRSADAPAYQQGQNQLYNELNLGRREEYDVLDKRRGRDPEMGGKPRRKNPQEGLYNELQKDKMAEAYSEIGMKGERRRGKGHDGLYQGLSTATKDTYDALHMQALPPR

SEQ ID NO: 3415 - protein, 358 aa, synthetic construct
  REGION 1..358: note = Synthetic
MALPVTALLLPLALLLHAARPEVQLLESGGGLVQPGGSLRLSCAASGSVFSSYFIGWFRQAPGKEREFVSAVISSSGSTYYADSVKGRFTISRDNSKNTLYLQMNSLKPEDTAVYYCVAREDVGEPYGYWGQGTQVTVSSTTTPAPRPPTPAPTIASQPLSLRPEACRPAAGGAVHTRGLDFACDIYIWAPLAGTCGVLLLSLVITLYCRRDQRLPPDAHKPPGGGSFRTPIQEEQADAHSTLAKIRVKFSRSADAPAYQQGQNQLYNELNLGRREEYDVLDKRRGRDPEMGGKPRRKNPQEGLYNELQKDKMAEAYSEIGMKGERRRGKGHDGLYQGLSTATKDTYDALHMQALPPR

SEQ ID NO: 3416 - DNA, 1077 bp, synthetic construct
  misc_feature 1..1077: note = Synthetic
  source 1..1077: mol_type = other DNA
atggccttaccagtgaccgccttgctcctgccgctggccttgctgctccacgccgccaggccggaggtgcagctgttggagtctgggggaggcttggtacagcctggggggtccctgagactctcctgtgcagcctctggaaggggctttacaagctattacatgggatggttccgccaggctccagggaaggaacgggagttcgtctcagctgtgattttcccggagggttaccgctactacgcagactccgtgaagggccggttcaccatctccagagacaattccaagaacacgctgtatctgcaaatgaacagcctgaagcccgaggacacggccgtatattactgtgcgaaatacacaggtttcggtgaggacgcctatcgctactggggccaagggacccaggtcaccgtctcctcaaccacgacgccagcgccgcggccaccaacaccggcgcccaccatcgcgtcgcagcccctgtccctgcgcccagaggcgtgccggccagcggcggggggcgcagtgcacacgagggggctggacttcgcctgtgatatctacatctgggcgcccttggccgggacttgtggggtccttctcctgtcactggttatcaccctttactgccggagggaccagaggctgccccccgatgcccacaagccccctgggggaggcagtttccggacccccatccaagaggagcaggccgacgcccactccaccctggccaagatcagagtgaagttcagcaggagcgcagacgcccccgcgtaccagcagggccagaaccagctctataacgagctcaatctaggacgaagagaggagtacgatgttttggacaagagacgtggccgggaccctgagatggggggaaagccgagaaggaagaaccctcaggaaggcctgtacaatgaactgcagaaagataagatggcggaggcctacagtgagattgggatgaaaggcgagcgccggaggggcaaggggcacgatggcctttaccagggtctcagtacagccaccaaggacacctacgacgcccttcacatgcaggccctgccccctcgc

SEQ ID NO: 3417 - DNA, 1074 bp, synthetic construct
  misc_feature 1..1074: note = Synthetic
  source 1..1074: mol_type = other DNA
atggccttaccagtgaccgccttgctcctgccgctggccttgctgctccacgccgccaggccggaggtgcagctgttggagtctgggggaggcttggtacagcctggggggtccctgagactctcctgtgcagcctctggactcacctttagcatacatactgtgggatggttccgccaggctccagggaaggaaagagagttcgtctcagctgcactgggtagtgggggtcgaccttactaccgcgactccgtgaagggccggttcaccatctccagagacaattccaagaacacgctgtatctgcaaatgaacagcctgaaaccagaggacacggccgtatattactgttatgttgacgtggggacagggctgtactatggctactggggccaagggacccaggtcaccgtctcctcaaccacgacgccagcgccgcggccaccaacaccggcgcccaccatcgcgtcgcagcccctgtccctgcgcccagaggcgtgccggccagcggcggggggcgcagtgcacacgagggggctggacttcgcctgtgatatctacatctgggcgcccttggccgggacttgtggggtccttctcctgtcactggttatcaccctttactgccggagggaccagaggctgccccccgatgcccacaagccccctgggggaggcagtttccggacccccatccaagaggagcaggccgacgcccactccaccctggccaagatcagagtgaagttcagcaggagcgcagacgcccccgcgtaccagcagggccagaaccagctctataacgagctcaatctaggacgaagagaggagtacgatgttttggacaagagacgtggccgggaccctgagatggggggaaagccgagaaggaagaaccctcaggaaggcctgtacaatgaactgcagaaagataagatggcggaggcctacagtgagattgggatgaaaggcgagcgccggaggggcaaggggcacgatggcctttaccagggtctcagtacagccaccaaggacacctacgacgcccttcacatgcaggccctgccccctcgc

SEQ ID NO: 3418 - DNA, 1083 bp, synthetic construct
  misc_feature 1..1083: note = Synthetic
  source 1..1083: mol_type = other DNA
atggccttaccagtgaccgccttgctcctgccgctggccttgctgctccacgccgccaggccggaggtgcagctgttggagtctgggggaggcttggtacagcctggggggtccctgagactctcctgtgcagcctctggaaggatctttagcagctattttatggggtggtttcgccaggctccagggaaggaacgggagtttgtctcagcccatattagtagcgaaggtagcacatactacagagactccgtgaagggccggttcaccatctccagagacaattccaagaacacgctgtatctgcaaatgaacagcctgaaaccagaggacacggccgtatattactgtgcggcccgcgagtacgcggatacacagcgcggcgagtacgcttactggggccaagggacccaagtcaccgtctcctcaaccacgacgccagcgccgcggccaccaacaccggcgcccaccatcgcgtcgcagcccctgtccctgcgcccagaggcgtgccggccagcggcggggggcgcagtgcacacgagggggctggacttcgcctgtgatatctacatctgggcgcccttggccgggacttgtggggtccttctcctgtcactggttatcaccctttactgccggagggaccagaggctgccccccgatgcccacaagccccctgggggaggcagtttccggacccccatccaagaggagcaggccgacgcccactccaccctggccaagatcagagtgaagttcagcaggagcgcagacgcccccgcgtaccagcagggccagaaccagctctataacgagctcaatctaggacgaagagaggagtacgatgttttggacaagagacgtggccgggaccctgagatggggggaaagccgagaaggaagaaccctcaggaaggcctgtacaatgaactgcagaaagataagatggcggaggcctacagtgagattgggatgaaaggcgagcgccggaggggcaaggggcacgatggcctttaccagggtctcagtacagccaccaaggacacctacgacgcccttcacatgcaggccctgccccctcgc

SEQ ID NO: 3419 - DNA, 1068 bp, synthetic construct
  misc_feature 1..1068: note = Synthetic
  source 1..1068: mol_type = other DNA
atggccttaccagtgaccgccttgctcctgccgctggccttgctgctccacgccgccaggccggaggtgcagctgttggagtctgggggaggcttggtacagcctggggggtccctgagactctcctgtgcagcctctggatctatagtcagcagctatgccatgggctggttccgccaggctccagggaaggaaagagagttcgtctcatccgctattggaaagggtggtgtaacaatttatgcagactccgtgaagggccggttcaccatctccagagataattccaagaacacgctgtatctgcaaatgaacagcctgaagccagaggacacggccgtatattactgtgcgacagatgagtctacttaccgtgactactggggccaagggacccaggtcaccgtctcctcaaccacgacgccagcgccgcggccaccaacaccggcgcccaccatcgcgtcgcagcccctgtccctgcgcccagaggcgtgccggccagcggcggggggcgcagtgcacacgagggggctggacttcgcctgtgatatctacatctgggcgcccttggccgggacttgtggggtccttctcctgtcactggttatcaccctttactgccggagggaccagaggctgccccccgatgcccacaagccccctgggggaggcagtttccggacccccatccaagaggagcaggccgacgcccactccaccctggccaagatcagagtgaagttcagcaggagcgcagacgcccccgcgtaccagcagggccagaaccagctctataacgagctcaatctaggacgaagagaggagtacgatgttttggacaagagacgtggccgggaccctgagatggggggaaagccgagaaggaagaaccctcaggaaggcctgtacaatgaactgcagaaagataagatggcggaggcctacagtgagattgggatgaaaggcgagcgccggaggggcaaggggcacgatggcctttaccagggtctcagtacagccaccaaggacacctacgacgcccttcacatgcaggccctgccccctcgc

SEQ ID NO: 3420 - DNA, 1065 bp, synthetic construct
  misc_feature 1..1065: note = Synthetic
  source 1..1065: mol_type = other DNA
atggccttaccagtgaccgccttgctcctgccgctggccttgctgctccacgccgccaggccggaggtgcagctgttggagtctgggggaggcttggtacagcctggggggtccctgagactctcctgtgcagcctctggatcactatttcaggtggagcacatcgggtggtttcgccaggctccagggaaggaaagagatttcgtctcagctcaagtcaccggtggcggttatacatactacgcagactccgtgaagggccggttcaccatctccagagacaattccaagaacacgctgtatctgcaaatgaacagcctgaaaccggaggacacggccgtatattactgttacgtacggctcgtggaagaagcatactggggccaagggacccaagtcaccgtctcctcaaccacgacgccagcgccgcggccaccaacaccggcgcccaccatcgcgtcgcagcccctgtccctgcgcccagaggcgtgccggccagcggcggggggcgcagtgcacacgagggggctggacttcgcctgtgatatctacatctgggcgcccttggccgggacttgtggggtccttctcctgtcactggttatcaccctttactgccggagggaccagaggctgccccccgatgcccacaagccccctgggggaggcagtttccggacccccatccaagaggagcaggccgacgcccactccaccctggccaagatcagagtgaagttcagcaggagcgcagacgcccccgcgtaccagcagggccagaaccagctctataacgagctcaatctaggacgaagagaggagtacgatgttttggacaagagacgtggccgggaccctgagatggggggaaagccgagaaggaagaaccctcaggaaggcctgtacaatgaactgcagaaagataagatggcggaggcctacagtgagattgggatgaaaggcgagcgccggaggggcaaggggcacgatggcctttaccagggtctcagtacagccaccaaggacacctacgacgcccttcacatgcaggccctgccccctcgc

SEQ ID NO: 3421 - DNA, 1083 bp, synthetic construct
  misc_feature 1..1083: note = Synthetic
  source 1..1083: mol_type = other DNA
atggccttaccagtgaccgccttgctcctgccgctggccttgctgctccacgccgccaggccggaggtgcagctgttggagtctgggggaggcttggtacagcctggggggtccctgagactctcctgtgcagcctctggaacaacctttgccagctctttcatgggatggttccgccaggctccagggaaggagcgcgagtttgtctcagctattgtttttccggggggtagcacatactacgcagactccgtgaagggccggttcaccatctccagagacaattccaagaacacgctgtatctgcaaatgaacagcctgaagcctgaggacacggccgtatattactgtgcggctagaagatatgagttggtggacaggctggagtacgcctactggggccaagggacccaggtcaccgtctcctcaaccacgacgccagcgccgcggccaccaacaccggcgcccaccatcgcgtcgcagcccctgtccctgcgcccagaggcgtgccggccagcggcggggggcgcagtgcacacgagggggctggacttcgcctgtgatatctacatctgggcgcccttggccgggacttgtggggtccttctcctgtcactggttatcaccctttactgccggagggaccagaggctgccccccgatgcccacaagccccctgggggaggcagtttccggacccccatccaagaggagcaggccgacgcccactccaccctggccaagatcagagtgaagttcagcaggagcgcagacgcccccgcgtaccagcagggccagaaccagctctataacgagctcaatctaggacgaagagaggagtacgatgttttggacaagagacgtggccgggaccctgagatggggggaaagccgagaaggaagaaccctcaggaaggcctgtacaatgaactgcagaaagataagatggcggaggcctacagtgagattgggatgaaaggcgagcgccggaggggcaaggggcacgatggcctttaccagggtctcagtacagccaccaaggacacctacgacgcccttcacatgcaggccctgccccctcgc

SEQ ID NO: 3422 - DNA, 1068 bp, synthetic construct
  misc_feature 1..1068: note = Synthetic
  source 1..1068: mol_type = other DNA
atggccttaccagtgaccgccttgctcctgccgctggccttgctgctccacgccgccaggccggaggtgcagctgttggagtctgggggaggcttggtacagcctggggggtccctgagactctcctgtgcagcctctggaagcgtgtttagcagctttactattgggtggtttcgccaggctccagggaaggagcgcgagtttgtctcagctattgtcactagcaccggtagtacatactatgcagactccgtgaagggccggttcaccatctccagagacaattccaagaacacgctgtatctgcaaatgaacagcctgaaaccggaggacacggccgtatattactgtaatgtgaggacacaggaggactattactactggggccaagggacccaggtcaccgtctcctcaaccacgacgccagcgccgcggccaccaacaccggcgcccaccatcgcgtcgcagcccctgtccctgcgcccagaggcgtgccggccagcggcggggggcgcagtgcacacgagggggctggacttcgcctgtgatatctacatctgggcgcccttggccgggacttgtggggtccttctcctgtcactggttatcaccctttactgccggagggaccagaggctgccccccgatgcccacaagccccctgggggaggcagtttccggacccccatccaagaggagcaggccgacgcccactccaccctggccaagatcagagtgaagttcagcaggagcgcagacgcccccgcgtaccagcagggccagaaccagctctataacgagctcaatctaggacgaagagaggagtacgatgttttggacaagagacgtggccgggaccctgagatggggggaaagccgagaaggaagaaccctcaggaaggcctgtacaatgaactgcagaaagataagatggcggaggcctacagtgagattgggatgaaaggcgagcgccggaggggcaaggggcacgatggcctttaccagggtctcagtacagccaccaaggacacctacgacgcccttcacatgcaggccctgccccctcgc

SEQ ID NO: 3423 - DNA, 1083 bp, synthetic construct
  misc_feature 1..1083: note = Synthetic
  source 1..1083: mol_type = other DNA
atggccttaccagtgaccgccttgctcctgccgctggccttgctgctccacgccgccaggccggaggtgcagctgttggagtctgggggaggcttggtacagcctggggggtccctgagactctcctgtgcagcctctggaagcatttttggcagccacttcatgggctggtttcgccaggctccagggaaggagcgggagttcgtctcagctgcggttaccagcggaggtagtacatactatgcagactccgtgaagggccggttcaccatctccagagacaattccaagaacacgctgtatctgcaaatgaacagcctgaaacctgaggacacggccgtatattactgtgcggctcgaacctaccagtcaacgtatcagcctgaatatgcctactggggccaagggacccaggtcaccgtctcctcaaccacgacgccagcgccgcggccaccaacaccggcgcccaccatcgcgtcgcagcccctgtccctgcgcccagaggcgtgccggccagcggcggggggcgcagtgcacacgagggggctggacttcgcctgtgatatctacatctgggcgcccttggccgggacttgtggggtccttctcctgtcactggttatcaccctttactgccggagggaccagaggctgccccccgatgcccacaagccccctgggggaggcagtttccggacccccatccaagaggagcaggccgacgcccactccaccctggccaagatcagagtgaagttcagcaggagcgcagacgcccccgcgtaccagcagggccagaaccagctctataacgagctcaatctaggacgaagagaggagtacgatgttttggacaagagacgtggccgggaccctgagatggggggaaagccgagaaggaagaaccctcaggaaggcctgtacaatgaactgcagaaagataagatggcggaggcctacagtgagattgggatgaaaggcgagcgccggaggggcaaggggcacgatggcctttaccagggtctcagtacagccaccaaggacacctacgacgcccttcacatgcaggccctgccccctcgc

SEQ ID NO: 3424 - DNA, 1089 bp, synthetic construct
  misc_feature 1..1089: note = Synthetic
  source 1..1089: mol_type = other DNA
atggccttaccagtgaccgccttgctcctgccgctggccttgctgctccacgccgccaggccggaggtgcagctgttggagtctgggggaggcttggtacagcctggggggtccctgagactctcctgtgcagcctctggatctatctttagcatcctggacatcgggtggttccgccaggctccagggaaggaacgagagttcgtctcagcctatattagcagcggtggtagtacatactattccgactccgtgaagggccggttcaccatctccagagataattccaagaacacgctgtatctgcaaatgaacagcctgaagccagaggacacggccgtatattactgtgtggctaccatctttggtgatcgtaccgagggccaggaaaggtacgctttctggggccaagggacccaagtcaccgtctcctcaaccacgacgccagcgccgcggccaccaacaccggcgcccaccatcgcgtcgcagcccctgtccctgcgcccagaggcgtgccggccagcggcggggggcgcagtgcacacgagggggctggacttcgcctgtgatatctacatctgggcgcccttggccgggacttgtggggtccttctcctgtcactggttatcaccctttactgccggagggaccagaggctgccccccgatgcccacaagccccctgggggaggcagtttccggacccccatccaagaggagcaggccgacgcccactccaccctggccaagatcagagtgaagttcagcaggagcgcagacgcccccgcgtaccagcagggccagaaccagctctataacgagctcaatctaggacgaagagaggagtacgatgttttggacaagagacgtggccgggaccctgagatggggggaaagccgagaaggaagaaccctcaggaaggcctgtacaatgaactgcagaaagataagatggcggaggcctacagtgagattgggatgaaaggcgagcgccggaggggcaaggggcacgatggcctttaccagggtctcagtacagccaccaaggacacctacgacgcccttcacatgcaggccctgccccctcgc

SEQ ID NO: 3425 - DNA, 1083 bp, synthetic construct
  misc_feature 1..1083: note = Synthetic
  source 1..1083: mol_type = other DNA
atggccttaccagtgaccgccttgctcctgccgctggccttgctgctccacgccgccaggccggaggtgcagctgttggagtctgggggaggcttggtacagcctggggggtccctgagactctcctgtgcagcctctggaagcaccacgagcagctattttatgggatggttccgccaggctccagggaaggaacgcgagtttgtctcagctattataactagcagtggtagtccctactatgcagactccgtgaagggccggttcaccatctccagagacaattccaagaacacgctgtatctgcaaatgaacagcctgaaacccgaggacacggccgtatattactgtgcggcgcgtcggtatgggtcgagggaaacggacgactatgggtactggggccaagggacccaggtcaccgtctcctcaaccacgacgccagcgccgcggccaccaacaccggcgcccaccatcgcgtcgcagcccctgtccctgcgcccagaggcgtgccggccagcggcggggggcgcagtgcacacgagggggctggacttcgcctgtgatatctacatctgggcgcccttggccgggacttgtggggtccttctcctgtcactggttatcaccctttactgccggagggaccagaggctgccccccgatgcccacaagccccctgggggaggcagtttccggacccccatccaagaggagcaggccgacgcccactccaccctggccaagatcagagtgaagttcagcaggagcgcagacgcccccgcgtaccagcagggccagaaccagctctataacgagctcaatctaggacgaagagaggagtacgatgttttggacaagagacgtggccgggaccctgagatggggggaaagccgagaaggaagaaccctcaggaaggcctgtacaatgaactgcagaaagataagatggcggaggcctacagtgagattgggatgaaaggcgagcgccggaggggcaaggggcacgatggcctttaccagggtctcagtacagccaccaaggacacctacgacgcccttcacatgcaggccctgccccctcgc

SEQ ID NO: 3426 - DNA, 1086 bp, synthetic construct
  misc_feature 1..1086: note = Synthetic
  source 1..1086: mol_type = other DNA
atggccttaccagtgaccgccttgctcctgccgctggccttgctgctccacgccgccaggccggaggtgcagctgttggagtctgggggaggcttggtacagcctggggggtccctgagactctcctgtgcagcctctggatctgtctttagcagctatagcatgtggtttcgccaggctccagggaaggaacgcgagtttgtctcagctattatcactagtggcggtagcacatactacgcagactccgtgaagggccggttcaccatctccagagacaattccaagaacacgctgtatctgcaaatgaacagcctgaaacccgaggacacggccgtatattactgtgtggccgtttacggcataggaactggacaatacatcggtacatatgacatctggggccaagggacccaggtcaccgtctcctcaaccacgacgccagcgccgcggccaccaacaccggcgcccaccatcgcgtcgcagcccctgtccctgcgcccagaggcgtgccggccagcggcggggggcgcagtgcacacgagggggctggacttcgcctgtgatatctacatctgggcgcccttggccgggacttgtggggtccttctcctgtcactggttatcaccctttactgccggagggaccagaggctgccccccgatgcccacaagccccctgggggaggcagtttccggacccccatccaagaggagcaggccgacgcccactccaccctggccaagatcagagtgaagttcagcaggagcgcagacgcccccgcgtaccagcagggccagaaccagctctataacgagctcaatctaggacgaagagaggagtacgatgttttggacaagagacgtggccgggaccctgagatggggggaaagccgagaaggaagaaccctcaggaaggcctgtacaatgaactgcagaaagataagatggcggaggcctacagtgagattgggatgaaaggcgagcgccggaggggcaaggggcacgatggcctttaccagggtctcagtacagccaccaaggacacctacgacgcccttcacatgcaggccctgccccctcgc

SEQ ID NO: 3427 - DNA, 1080 bp, synthetic construct
  misc_feature 1..1080: note = Synthetic
  source 1..1080: mol_type = other DNA
atggccttaccagtgaccgccttgctcctgccgctggccttgctgctccacgccgccaggccggaggtgcagctgttggagtctgggggaggcttggtacagcctggggggtccctgagactctcctgtgcagcctctggatccctactgagcatttatgatatgggctggtttcgccaggctccagggaaggagcgagagttcgtctcagcccgtattggcaaaggtggtagtacatactatgcagactccgtgaagggccggttcaccatctccagagataattccaagaacacgctgtatctgcaaatgaacagcctgaaaccggaggacacggccgtatattactgtgcggttctggttggtgagggtgaatcttacggctatcactactggggccaagggacccaggtcaccgtctcctcaaccacgacgccagcgccgcggccaccaacaccggcgcccaccatcgcgtcgcagcccctgtccctgcgcccagaggcgtgccggccagcggcggggggcgcagtgcacacgagggggctggacttcgcctgtgatatctacatctgggcgcccttggccgggacttgtggggtccttctcctgtcactggttatcaccctttactgccggagggaccagaggctgccccccgatgcccacaagccccctgggggaggcagtttccggacccccatccaagaggagcaggccgacgcccactccaccctggccaagatcagagtgaagttcagcaggagcgcagacgcccccgcgtaccagcagggccagaaccagctctataacgagctcaatctaggacgaagagaggagtacgatgttttggacaagagacgtggccgggaccctgagatggggggaaagccgagaaggaagaaccctcaggaaggcctgtacaatgaactgcagaaagataagatggcggaggcctacagtgagattgggatgaaaggcgagcgccggaggggcaaggggcacgatggcctttaccagggtctcagtacagccaccaaggacacctacgacgcccttcacatgcaggccctgccccctcgc

SEQ ID NO: 3428 - DNA, 1086 bp, synthetic construct
  misc_feature 1..1086: note = Synthetic
  source 1..1086: mol_type = other DNA
atggccttaccagtgaccgccttgctcctgccgctggccttgctgctccacgccgccaggccggaggtgcagctgttggagtctgggggaggcttggtacagcctggggggtccctgagactctcctgtgcagcctctggaattggcctgagcatatatttcatgggatggtttcgccaggctccagggaaggagcgcgagtttgtctcagctattattagttctagtggtagcacatactacgcagactccgtgaagggccggttcaccatctccagagacaattccaagaacacgctgtatctgcaaatgaacagcctgaagccagaggacacggccgtatattactgtgcggctcgaaccggctactctgaatacgagcaggaagactatggctactggggccaagggacccaagtcaccgtctcctcaaccacgacgccagcgccgcggccaccaacaccggcgcccaccatcgcgtcgcagcccctgtccctgcgcccagaggcgtgccggccagcggcggggggcgcagtgcacacgagggggctggacttcgcctgtgatatctacatctgggcgcccttggccgggacttgtggggtccttctcctgtcactggttatcaccctttactgccggagggaccagaggctgccccccgatgcccacaagccccctgggggaggcagtttccggacccccatccaagaggagcaggccgacgcccactccaccctggccaagatcagagtgaagttcagcaggagcgcagacgcccccgcgtaccagcagggccagaaccagctctataacgagctcaatctaggacgaagagaggagtacgatgttttggacaagagacgtggccgggaccctgagatggggggaaagccgagaaggaagaaccctcaggaaggcctgtacaatgaactgcagaaagataagatggcggaggcctacagtgagattgggatgaaaggcgagcgccggaggggcaaggggcacgatggcctttaccagggtctcagtacagccaccaaggacacctacgacgcccttcacatgcaggccctgccccctcgc

SEQ ID NO: 3429 - DNA, 1083 bp, synthetic construct
  misc_feature 1..1083: note = Synthetic
  source 1..1083: mol_type = other DNA
atggccttaccagtgaccgccttgctcctgccgctggccttgctgctccacgccgccaggccggaggtgcagctgttggagtctgggggaggcttggtacagcctggggggtccctgagactctcctgtgcagcctctggaagcatttttagcagctccttcatcggatggttccgccaggctccagggaaggagcgggagtttgtctcagctgtcattgctagcagtggtagtacatactatgcagactccgtgaagggccggttcaccatctccagagacaattccaagaacacgctgtatctgcaaatgaacagcctgaaaccagaggacacggccgtatattactgtgcgggccggttcgggcaggggggggggaccgtggaatatggctactggggccaagggacccaagtcaccgtctcctcaaccacgacgccagcgccgcggccaccaacaccggcgcccaccatcgcgtcgcagcccctgtccctgcgcccagaggcgtgccggccagcggcggggggcgcagtgcacacgagggggctggacttcgcctgtgatatctacatctgggcgcccttggccgggacttgtggggtccttctcctgtcactggttatcaccctttactgccggagggaccagaggctgccccccgatgcccacaagccccctgggggaggcagtttccggacccccatccaagaggagcaggccgacgcccactccaccctggccaagatcagagtgaagttcagcaggagcgcagacgcccccgcgtaccagcagggccagaaccagctctataacgagctcaatctaggacgaagagaggagtacgatgttttggacaagagacgtggccgggaccctgagatggggggaaagccgagaaggaagaaccctcaggaaggcctgtacaatgaactgcagaaagataagatggcggaggcctacagtgagattgggatgaaaggcgagcgccggaggggcaaggggcacgatggcctttaccagggtctcagtacagccaccaaggacacctacgacgcccttcacatgcaggccctgccccctcgc

SEQ ID NO: 3430 - DNA, 1083 bp, synthetic construct
  misc_feature 1..1083: note = Synthetic
  source 1..1083: mol_type = other DNA
atggccttaccagtgaccgccttgctcctgccgctggccttgctgctccacgccgccaggccggaggtgcagctgttggagtctgggggaggcttggtacagcctggggggtccctgagactctcctgtgcagcctctggacgagtgtttagcttctattttatggggtggttccgccaggctccagggaaggaaagggagttcgtcagtggcgttattggcaaaaccggtagtacatactatactgactccgtgaagggccggttcaccatctccagagataattccaagaacacgctgtatctgcaaatgaacagcctgaaacccgaggacacggccgtatattactgtgcggccagtgaataccaaggtaccgggtacggagaatttgcatactggggccaagggacccaggtcaccgtctcctcaaccacgacgccagcgccgcggccaccaacaccggcgcccaccatcgcgtcgcagcccctgtccctgcgcccagaggcgtgccggccagcggcggggggcgcagtgcacacgagggggctggacttcgcctgtgatatctacatctgggcgcccttggccgggacttgtggggtccttctcctgtcactggttatcaccctttactgccggagggaccagaggctgccccccgatgcccacaagccccctgggggaggcagtttccggacccccatccaagaggagcaggccgacgcccactccaccctggccaagatcagagtgaagttcagcaggagcgcagacgcccccgcgtaccagcagggccagaaccagctctataacgagctcaatctaggacgaagagaggagtacgatgttttggacaagagacgtggccgggaccctgagatggggggaaagccgagaaggaagaaccctcaggaaggcctgtacaatgaactgcagaaagataagatggcggaggcctacagtgagattgggatgaaaggcgagcgccggaggggcaaggggcacgatggcctttaccagggtctcagtacagccaccaaggacacctacgacgcccttcacatgcaggccctgccccctcgc

SEQ ID NO: 3431 - DNA, 1065 bp, synthetic construct
  misc_feature 1..1065: note = Synthetic
  source 1..1065: mol_type = other DNA
atggccttaccagtgaccgccttgctcctgccgctggccttgctgctccacgccgccaggccggaggtgcagctgttggagtctgggggaggcttggtacagcctggggggtccctgagactctcctgtgcagcctctggaagtttgtttgaagtcgaacacatcggatggttccgccaggctccagggaaggagagggagtttgtctcagctcaagtgaccggtggcggttatacatactacgcagactccgtgaagggccggttcaccatctccagagacaattccaagaacacgctgtatctgcaaatgaacagcctgaaaccggaggacacggccgtatattactgttacgtccggcttgtggaggaagcctactggggccaagggacccaagtcaccgtctcctcaaccacgacgccagcgccgcggccaccaacaccggcgcccaccatcgcgtcgcagcccctgtccctgcgcccagaggcgtgccggccagcggcggggggcgcagtgcacacgagggggctggacttcgcctgtgatatctacatctgggcgcccttggccgggacttgtggggtccttctcctgtcactggttatcaccctttactgccggagggaccagaggctgccccccgatgcccacaagccccctgggggaggcagtttccggacccccatccaagaggagcaggccgacgcccactccaccctggccaagatcagagtgaagttcagcaggagcgcagacgcccccgcgtaccagcagggccagaaccagctctataacgagctcaatctaggacgaagagaggagtacgatgttttggacaagagacgtggccgggaccctgagatggggggaaagccgagaaggaagaaccctcaggaaggcctgtacaatgaactgcagaaagataagatggcggaggcctacagtgagattgggatgaaaggcgagcgccggaggggcaaggggcacgatggcctttaccagggtctcagtacagccaccaaggacacctacgacgcccttcacatgcaggccctgccccctcgc

SEQ ID NO: 3432 - DNA, 1089 bp, synthetic construct
  misc_feature 1..1089: note = Synthetic
  source 1..1089: mol_type = other DNA
atggccttaccagtgaccgccttgctcctgccgctggccttgctgctccacgccgccaggccggaggtgcagctgttggagtctgggggaggcttggtacagcctggggggtccctgagactctcctgtgcagcctctggacggatttttggagagtattttatcggatggttccgccaggctccagggaaggagcgggagttcgtctcagctattatcaccggcagtggtattacacactacgcagactccgtgaagggccggttcaccatctccagagacaattccaagaacacgctgtatctgcaaatgaacagcctgaaaccggaggacacggccgtatattactgtgcggcgcgcacagactacactacaggccaggaactaccagaatacgggtactggggccaagggacccaggtcaccgtctcctcaaccacgacgccagcgccgcggccaccaacaccggcgcccaccatcgcgtcgcagcccctgtccctgcgcccagaggcgtgccggccagcggcggggggcgcagtgcacacgagggggctggacttcgcctgtgatatctacatctgggcgcccttggccgggacttgtggggtccttctcctgtcactggttatcaccctttactgccggagggaccagaggctgccccccgatgcccacaagccccctgggggaggcagtttccggacccccatccaagaggagcaggccgacgcccactccaccctggccaagatcagagtgaagttcagcaggagcgcagacgcccccgcgtaccagcagggccagaaccagctctataacgagctcaatctaggacgaagagaggagtacgatgttttggacaagagacgtggccgggaccctgagatggggggaaagccgagaaggaagaaccctcaggaaggcctgtacaatgaactgcagaaagataagatggcggaggcctacagtgagattgggatgaaaggcgagcgccggaggggcaaggggcacgatggcctttaccagggtctcagtacagccaccaaggacacctacgacgcccttcacatgcaggccctgccccctcgc

SEQ ID NO: 3433 - DNA, 1074 bp, synthetic construct
  misc_feature 1..1074: note = Synthetic
  source 1..1074: mol_type = other DNA
atggccttaccagtgaccgccttgctcctgccgctggccttgctgctccacgccgccaggccggaggtgcagctgttggagtctgggggaggcttggtacagcctggggggtccctgagactctcctgtgcagcctctggatcaattgagagcatttatttcatcgggtggtttcgccaggctccagggaaggagagagagtttgtctcagctgaattcatcccaggaggtagcacagtgtactcagactccgtgaagggccggttcaccatctccagagacaattccaagaacacgctgtatctgcaaatgaacagcctgaaacccgaggacacggccgtatattactgtaacgccggcctagacgaagggcggtactacacctactggggccaagggacccaggtcaccgtctcctcaaccacgacgccagcgccgcggccaccaacaccggcgcccaccatcgcgtcgcagcccctgtccctgcgcccagaggcgtgccggccagcggcggggggcgcagtgcacacgagggggctggacttcgcctgtgatatctacatctgggcgcccttggccgggacttgtggggtccttctcctgtcactggttatcaccctttactgccggagggaccagaggctgccccccgatgcccacaagccccctgggggaggcagtttccggacccccatccaagaggagcaggccgacgcccactccaccctggccaagatcagagtgaagttcagcaggagcgcagacgcccccgcgtaccagcagggccagaaccagctctataacgagctcaatctaggacgaagagaggagtacgatgttttggacaagagacgtggccgggaccctgagatggggggaaagccgagaaggaagaaccctcaggaaggcctgtacaatgaactgcagaaagataagatggcggaggcctacagtgagattgggatgaaaggcgagcgccggaggggcaaggggcacgatggcctttaccagggtctcagtacagccaccaaggacacctacgacgcccttcacatgcaggccctgccccctcgc

SEQ ID NO: 3434 - DNA, 1065 bp, synthetic construct
  misc_feature 1..1065: note = Synthetic
  source 1..1065: mol_type = other DNA
atggccttaccagtgaccgccttgctcctgccgctggccttgctgctccacgccgccaggccggaggtgcagctgttggagtctgggggaggcttggtacagcctggggggtccctgagactctcctgtgcagcctctggaatagaggtcagcagcagtgtagtgggttggtttcgccaggctccagggaaggagcgggagtttgtctcagctagcggtgtgggaggtagcacatactacgcagactccgtgaagggccggttcaccatctccagagacaattccaagaacacgctgtatctgcaaatgaacagcctgaagcctgaggacacggccgtatattactgttatgcagtgtacttgaccatctacacctactggggccaagggacccaggtcaccgtctcctcaaccacgacgccagcgccgcggccaccaacaccggcgcccaccatcgcgtcgcagcccctgtccctgcgcccagaggcgtgccggccagcggcggggggcgcagtgcacacgagggggctggacttcgcctgtgatatctacatctgggcgcccttggccgggacttgtggggtccttctcctgtcactggttatcaccctttactgccggagggaccagaggctgccccccgatgcccacaagccccctgggggaggcagtttccggacccccatccaagaggagcaggccgacgcccactccaccctggccaagatcagagtgaagttcagcaggagcgcagacgcccccgcgtaccagcagggccagaaccagctctataacgagctcaatctaggacgaagagaggagtacgatgttttggacaagagacgtggccgggaccctgagatggggggaaagccgagaaggaagaaccctcaggaaggcctgtacaatgaactgcagaaagataagatggcggaggcctacagtgagattgggatgaaaggcgagcgccggaggggcaaggggcacgatggcctttaccagggtctcagtacagccaccaaggacacctacgacgcccttcacatgcaggccctgccccctcgc

SEQ ID NO: 3435 - DNA, 1068 bp, synthetic construct
  misc_feature 1..1068: note = Synthetic
  source 1..1068: mol_type = other DNA
atggccttaccagtgaccgccttgctcctgccgctggccttgctgctccacgccgccaggccggaggtgcagctgttggagtctgggggaggcttggtacagcctggggggtccctgagactctcctgtgcagcctctggattcaccatcagcagatatgccatggcatggtttcgccaggctccagggaaggaacgcgagttcgtcagtgggagcattttcgttggtggtggcacatactatagggactccgtgaagggccggttcaccatctccagagataattccaagaacacgctgtatctgcaaatgaacagcctgaaacctgaggacacggccgtatattactgttatgccaccgtgggtgactcctattattactggggccaagggacccaggtcaccgtctcctcaaccacgacgccagcgccgcggccaccaacaccggcgcccaccatcgcgtcgcagcccctgtccctgcgcccagaggcgtgccggccagcggcggggggcgcagtgcacacgagggggctggacttcgcctgtgatatctacatctgggcgcccttggccgggacttgtggggtccttctcctgtcactggttatcaccctttactgccggagggaccagaggctgccccccgatgcccacaagccccctgggggaggcagtttccggacccccatccaagaggagcaggccgacgcccactccaccctggccaagatcagagtgaagttcagcaggagcgcagacgcccccgcgtaccagcagggccagaaccagctctataacgagctcaatctaggacgaagagaggagtacgatgttttggacaagagacgtggccgggaccctgagatggggggaaagccgagaaggaagaaccctcaggaaggcctgtacaatgaactgcagaaagataagatggcggaggcctacagtgagattgggatgaaaggcgagcgccggaggggcaaggggcacgatggcctttaccagggtctcagtacagccaccaaggacacctacgacgcccttcacatgcaggccctgccccctcgc

SEQ ID NO: 3436 - DNA, 1065 bp, synthetic construct
  misc_feature 1..1065: note = Synthetic
  source 1..1065: mol_type = other DNA
atggccttaccagtgaccgccttgctcctgccgctggccttgctgctccacgccgccaggccggaggtgcagctgttggagtctgggggaggcttggtacagcctggggggtccctgagactctcctgtgcagcctctggaagcctgtttagcgttgagcacatcggctggttccgccaggctccagggaaggagagagagtttgtctcagctcaggtaaccggtgggggttatacatactacgcagactccgtgaagggccggttcaccatctccagagacaattccaagaacacgctgtatctgcaaatgaacagcctgaaaccagaggacacggccgtatattactgttatgttagacttgtggaggaagcttactggggccaagggacccaggtcaccgtctcctcaaccacgacgccagcgccgcggccaccaacaccggcgcccaccatcgcgtcgcagcccctgtccctgcgcccagaggcgtgccggccagcggcggggggcgcagtgcacacgagggggctggacttcgcctgtgatatctacatctgggcgcccttggccgggacttgtggggtccttctcctgtcactggttatcaccctttactgccggagggaccagaggctgccccccgatgcccacaagccccctgggggaggcagtttccggacccccatccaagaggagcaggccgacgcccactccaccctggccaagatcagagtgaagttcagcaggagcgcagacgcccccgcgtaccagcagggccagaaccagctctataacgagctcaatctaggacgaagagaggagtacgatgttttggacaagagacgtggccgggaccctgagatggggggaaagccgagaaggaagaaccctcaggaaggcctgtacaatgaactgcagaaagataagatggcggaggcctacagtgagattgggatgaaaggcgagcgccggaggggcaaggggcacgatggcctttaccagggtctcagtacagccaccaaggacacctacgacgcccttcacatgcaggccctgccccctcgc

SEQ ID NO: 3437 - DNA, 1068 bp, synthetic construct
  misc_feature 1..1068: note = Synthetic
  source 1..1068: mol_type = other DNA
atggccttaccagtgaccgccttgctcctgccgctggccttgctgctccacgccgccaggccggaggtgcagctgttggagtctgggggaggcttggtacagcctggggggtccctgagactctcctgtgcagcctctggattcatctttagcatttatgatatgggttggttccgccaggctccagggaaggaaagggagttcgtctcagctattagtactaccggtggaagcatttactacgcagactccgtgaagggccggttcaccatctccagagacaattccaagaacacgctgtatctgcaaatgaacagcctgaagccagaggacacggccgtatattactgtaacgccgaccctttagaaagctacgggtactggggccaagggacccaggtcaccgtctcctcaaccacgacgccagcgccgcggccaccaacaccggcgcccaccatcgcgtcgcagcccctgtccctgcgcccagaggcgtgccggccagcggcggggggcgcagtgcacacgagggggctggacttcgcctgtgatatctacatctgggcgcccttggccgggacttgtggggtccttctcctgtcactggttatcaccctttactgccggagggaccagaggctgccccccgatgcccacaagccccctgggggaggcagtttccggacccccatccaagaggagcaggccgacgcccactccaccctggccaagatcagagtgaagttcagcaggagcgcagacgcccccgcgtaccagcagggccagaaccagctctataacgagctcaatctaggacgaagagaggagtacgatgttttggacaagagacgtggccgggaccctgagatggggggaaagccgagaaggaagaaccctcaggaaggcctgtacaatgaactgcagaaagataagatggcggaggcctacagtgagattgggatgaaaggcgagcgccggaggggcaaggggcacgatggcctttaccagggtctcagtacagccaccaaggacacctacgacgcccttcacatgcaggccctgccccctcgc

SEQ ID NO: 3438 - DNA, 1074 bp, synthetic construct
  misc_feature 1..1074: note = Synthetic
  source 1..1074: mol_type = other DNA
atggccttaccagtgaccgccttgctcctgccgctggccttgctgctccacgccgccaggccggaggtgcagctgttggagtctgggggaggcttggtacagcctggggggtccctgagactctcctgtgcagcctctggatccgtatttagcagctatttcattggctggttccgccaggctccagggaaggagagagagttcgtctcagcagtgattagtagcagtggtagcacatactacgcagactccgtgaagggccggttcaccatctccagagacaattccaagaacacgctgtatctgcaaatgaacagcctgaagcctgaggacacggccgtatattactgtgttgcacgggaggatgttggcgagccctacggctactggggccaagggacccaggtcaccgtctcctcaaccacgacgccagcgccgcggccaccaacaccggcgcccaccatcgcgtcgcagcccctgtccctgcgcccagaggcgtgccggccagcggcggggggcgcagtgcacacgagggggctggacttcgcctgtgatatctacatctgggcgcccttggccgggacttgtggggtccttctcctgtcactggttatcaccctttactgccggagggaccagaggctgccccccgatgcccacaagccccctgggggaggcagtttccggacccccatccaagaggagcaggccgacgcccactccaccctggccaagatcagagtgaagttcagcaggagcgcagacgcccccgcgtaccagcagggccagaaccagctctataacgagctcaatctaggacgaagagaggagtacgatgttttggacaagagacgtggccgggaccctgagatggggggaaagccgagaaggaagaaccctcaggaaggcctgtacaatgaactgcagaaagataagatggcggaggcctacagtgagattgggatgaaaggcgagcgccggaggggcaaggggcacgatggcctttaccagggtctcagtacagccaccaaggacacctacgacgcccttcacatgcaggccctgccccctcgc

SEQ ID NO: 3439 - DNA, 1077 bp, synthetic construct
  misc_feature 1..1077: note = Synthetic
  source 1..1077: mol_type = other DNA
atggccttaccagtgaccgccttgctcctgccgctggccttgctgctccacgccgccaggccggaggtgcagctgctggaaagcggcggcggactggtgcaacctggaggatctctgagactgagctgcgctgcttctggccggggctttaccagctactacatgggctggttcagacaggcccctggcaaggaacgggaattcgtgtccgccgtgatcttcccagagggctaccggtactacgccgacagcgtgaaaggcagattcaccatcagcagagataatagcaagaacaccctgtacctgcagatgaacagcctcaagcccgaggacacagccgtctactattgtgccaagtacacaggcttcggcgaggacgcctacagatactggggccagggcacccaggtgaccgtgtccagcaccacgacgccagcgccgcggccaccaacaccggcgcccaccatcgcgtcgcagcccctgtccctgcgcccagaggcgtgccggccagcggcggggggcgcagtgcacacgagggggctggacttcgcctgtgatatctacatctgggcgcccttggccgggacttgtggggtccttctcctgtcactggttatcaccctttactgccggagggaccagaggctgccccccgatgcccacaagccccctgggggaggcagtttccggacccccatccaagaggagcaggccgacgcccactccaccctggccaagatcagagtgaagttcagcaggagcgcagacgcccccgcgtaccagcagggccagaaccagctctataacgagctcaatctaggacgaagagaggagtacgatgttttggacaagagacgtggccgggaccctgagatggggggaaagccgagaaggaagaaccctcaggaaggcctgtacaatgaactgcagaaagataagatggcggaggcctacagtgagattgggatgaaaggcgagcgccggaggggcaaggggcacgatggcctttaccagggtctcagtacagccaccaaggacacctacgacgcccttcacatgcaggccctgccccctcgc

SEQ ID NO: 3440 - DNA, 1074 bp, synthetic construct
  misc_feature 1..1074: note = Synthetic
  source 1..1074: mol_type = other DNA
atggccttaccagtgaccgccttgctcctgccgctggccttgctgctccacgccgccaggccggaggtgcagctgctggaatctggcggaggcctggtgcaacctggaggatctctgagactgagctgtgccgcttctggcctcacattcagcatccacacagttggctggtttagacaggcccctggcaaagagcgggaattcgtgtccgccgccctgggcagcggcggacgcccatactatagagatagcgtgaagggcagattcaccatcagccgggacaatagcaagaacaccctgtacctgcagatgaacagcctgaagcccgaggacaccgccgtgtactactgctacgtggacgtgggcaccggcctgtactacggctactggggccagggcacacaggtgaccgtctccagcaccacgacgccagcgccgcggccaccaacaccggcgcccaccatcgcgtcgcagcccctgtccctgcgcccagaggcgtgccggccagcggcggggggcgcagtgcacacgagggggctggacttcgcctgtgatatctacatctgggcgcccttggccgggacttgtggggtccttctcctgtcactggttatcaccctttactgccggagggaccagaggctgccccccgatgcccacaagccccctgggggaggcagtttccggacccccatccaagaggagcaggccgacgcccactccaccctggccaagatcagagtgaagttcagcaggagcgcagacgcccccgcgtaccagcagggccagaaccagctctataacgagctcaatctaggacgaagagaggagtacgatgttttggacaagagacgtggccgggaccctgagatggggggaaagccgagaaggaagaaccctcaggaaggcctgtacaatgaactgcagaaagataagatggcggaggcctacagtgagattgggatgaaaggcgagcgccggaggggcaaggggcacgatggcctttaccagggtctcagtacagccaccaaggacacctacgacgcccttcacatgcaggccctgccccctcgc

SEQ ID NO: 3441 - DNA, 1074 bp, synthetic construct; identical to SEQ ID NO: 3440
  misc_feature 1..1074: note = Synthetic
  source 1..1074: mol_type = other DNA

SEQ ID NO: 3442 - DNA, 1068 bp, synthetic construct
  misc_feature 1..1068: note = Synthetic
  source 1..1068: mol_type = other DNA
atggccttaccagtgaccgccttgctcctgccgctggccttgctgctccacgccgccaggccggaggtgcagctgctggaaagcggaggcggcctggttcaacctggaggatctctgagactgagctgcgccgctagcggctctatcgtgtccagctacgccatgggctggtttagacaggcccctggcaaagagcgggaattcgtgtcctccgccatcggcaagggcggcgtcacaatctacgccgacagcgtgaagggcagattcaccatcagcagagataatagcaagaacaccctgtacctccagatgaacagcctgaagcccgaggacaccgccgtgtactattgtgctacagatgagagcacctaccgggactactggggccagggcacacaggtgaccgtgtctagcaccacgacgccagcgccgcggccaccaacaccggcgcccaccatcgcgtcgcagcccctgtccctgcgcccagaggcgtgccggccagcggcggggggcgcagtgcacacgagggggctggacttcgcctgtgatatctacatctgggcgcccttggccgggacttgtggggtccttctcctgtcactggttatcaccctttactgccggagggaccagaggctgccccccgatgcccacaagccccctgggggaggcagtttccggacccccatccaagaggagcaggccgacgcccactccaccctggccaagatcagagtgaagttcagcaggagcgcagacgcccccgcgtaccagcagggccagaaccagctctataacgagctcaatctaggacgaagagaggagtacgatgttttggacaagagacgtggccgggaccctgagatggggggaaagccgagaaggaagaaccctcaggaaggcctgtacaatgaactgcagaaagataagatggcggaggcctacagtgagattgggatgaaaggcgagcgccggaggggcaaggggcacgatggcctttaccagggtctcagtacagccaccaaggacacctacgacgcccttcacatgcaggccctgccccctcgc

SEQ ID NO: 3443 - DNA, 1065 bp, synthetic construct
  misc_feature 1..1065: note = Synthetic
  source 1..1065: mol_type = other DNA
atggccttaccagtgaccgccttgctcctgccgctggccttgctgctccacgccgccaggccggaggtgcagctgctggaaagcggcggaggcctggtgcaacctggcggcagcctgagactgagctgcgctgcttctggatctctgtttcaggtcgagcacatcggctggttcagacaggcccctggcaaggaacgggacttcgtgtccgcccaggttacaggcggaggctacacctactacgccgacagcgtgaaaggcagattcaccatcagcagagataatagcaagaacaccctgtacctgcagatgaacagcctgaagcccgaggacaccgccgtgtactattgttacgtgcggctcgtggaagaggcctactggggccagggcacacaggtgaccgtgtccagcaccacgacgccagcgccgcggccaccaacaccggcgcccaccatcgcgtcgcagcccctgtccctgcgcccagaggcgtgccggccagcggcggggggcgcagtgcacacgagggggctggacttcgcctgtgatatctacatctgggcgcccttggccgggacttgtggggtccttctcctgtcactggttatcaccctttactgccggagggaccagaggctgccccccgatgcccacaagccccctgggggaggcagtttccggacccccatccaagaggagcaggccgacgcccactccaccctggccaagatcagagtgaagttcagcaggagcgcagacgcccccgcgtaccagcagggccagaaccagctctataacgagctcaatctaggacgaagagaggagtacgatgttttggacaagagacgtggccgggaccctgagatggggggaaagccgagaaggaagaaccctcaggaaggcctgtacaatgaactgcagaaagataagatggcggaggcctacagtgagattgggatgaaaggcgagcgccggaggggcaaggggcacgatggcctttaccagggtctcagtacagccaccaaggacacctacgacgcccttcacatgcaggccctgccccctcgc

SEQ ID NO: 3444 - DNA, 1083 bp, synthetic construct
  misc_feature 1..1083: note = Synthetic
  source 1..1083: mol_type = other DNA
atggccttaccagtgaccgccttgctcctgccgctggccttgctgctccacgccgccaggccggaggtgcagctgctggaaagcggcggcggactggtgcaacctggcggatctctgcggttgtcttgtgctgccagcggaacaaccttcgcctctagctttatgggctggttccggcaggcccctggcaaggaaagagagttcgtgtccgccatcgtgttcccaggcggcagcacatactatgccgacagcgtgaagggcagattcaccatcagcagagataattcaaagaacaccctgtacctgcagatgaacagcctgaaacccgaggacaccgccgtgtactactgcgccgctagacggtacgagctggtcgacagactggaatacgcctactggggccagggcacacaggtgaccgtgtccagcaccacgacgccagcgccgcggccaccaacaccggcgcccaccatcgcgtcgcagcccctgtccctgcgcccagaggcgtgccggccagcggcggggggcgcagtgcacacgagggggctggacttcgcctgtgatatctacatctgggcgcccttggccgggacttgtggggtccttctcctgtcactggttatcaccctttactgccggagggaccagaggctgccccccgatgcccacaagccccctgggggaggcagtttccggacccccatccaagaggagcaggccgacgcccactccaccctggccaagatcagagtgaagttcagcaggagcgcagacgcccccgcgtaccagcagggccagaaccagctctataacgagctcaatctaggacgaagagaggagtacgatgttttggacaagagacgtggccgggaccctgagatggggggaaagccgagaaggaagaaccctcaggaaggcctgtacaatgaactgcagaaagataagatggcggaggcctacagtgagattgggatgaaaggcgagcgccggaggggcaaggggcacgatggcctttaccagggtctcagtacagccaccaaggacacctacgacgcccttcacatgcaggccctgccccctcgc

SEQ ID NO: 3445 - DNA, 1068 bp, synthetic construct
  misc_feature 1..1068: note = Synthetic
  source 1..1068: mol_type = other DNA
atggccttaccagtgaccgccttgctcctgccgctggccttgctgctccacgccgccaggccggaggtgcagctgctggaaagcggcggcggactggttcagcctggaggaagcctgagactgtcttgtgccgcctctggctctgtgttcagcagctttaccatcggctggttccggcaggcccccggcaaggagagagaattcgtgtccgccatcgtgacaagcaccggcagcacatactacgctgatagcgtcaagggcagattcacaatcagcagagacaatagcaaaaacaccctgtacctgcaaatgaactccctcaagcctgaggacaccgccgtgtactactgcaacgtgcggacccaggaggactactactattggggccagggcacccaggtgaccgtgtccagcaccacgacgccagcgccgcggccaccaacaccggcgcccaccatcgcgtcgcagcccctgtccctgcgcccagaggcgtgccggccagcggcggggggcgcagtgcacacgagggggctggacttcgcctgtgatatctacatctgggcgcccttggccgggacttgtggggtccttctcctgtcactggttatcaccctttactgccggagggaccagaggctgccccccgatgcccacaagccccctgggggaggcagtttccggacccccatccaagaggagcaggccgacgcccactccaccctggccaagatcagagtgaagttcagcaggagcgcagacgcccccgcgtaccagcagggccagaaccagctctataacgagctcaatctaggacgaagagaggagtacgatgttttggacaagagacgtggccgggaccctgagatggggggaaagccgagaaggaagaaccctcaggaaggcctgtacaatgaactgcagaaagataagatggcggaggcctacagtgagattgggatgaaaggcgagcgccggaggggcaaggggcacgatggcctttaccagggtctcagtacagccaccaaggacacctacgacgcccttcacatgcaggccctgccccctcgc

SEQ ID NO: 3446 - DNA, 1083 bp, synthetic construct
  misc_feature 1..1083: note = Synthetic
  source 1..1083: mol_type = other DNA
atggccttaccagtgaccgccttgctcctgccgctggccttgctgctccacgccgccaggccggaggtgcagctgctggaaagcggaggaggcctggtccagccaggcggctccctgagactgagctgtgccgcttctggcagcatcttcggcagccactttatgggctggttccggcaggcccctggcaaagagcgggaattcgtgtccgccgctgtgaccagcggcggatctacatattacgccgacagcgtgaagggcagattcaccatcagcagagataattctaagaacaccctgtacctgcagatgaacagcctcaagcccgaggacaccgccgtgtactactgcgccgccagaacctaccagagcacctaccaacctgagtacgcctactggggccagggcacacaggtgacagtgtccagcaccacgacgccagcgccgcggccaccaacaccggcgcccaccatcgcgtcgcagcccctgtccctgcgcccagaggcgtgccggccagcggcggggggcgcagtgcacacgagggggctggacttcgcctgtgatatctacatctgggcgcccttggccgggacttgtggggtccttctcctgtcactggttatcaccctttactgccggagggaccagaggctgccccccgatgcccacaagccccctgggggaggcagtttccggacccccatccaagaggagcaggccgacgcccactccaccctggccaagatcagagtgaagttcagcaggagcgcagacgcccccgcgtaccagcagggccagaaccagctctataacgagctcaatctaggacgaagagaggagtacgatgttttggacaagagacgtggccgggaccctgagatggggggaaagccgagaaggaagaaccctcaggaaggcctgtacaatgaactgcagaaagataagatggcggaggcctacagtgagattgggatgaaaggcgagcgccggaggggcaaggggcacgatggcctttaccagggtctcagtacagccaccaaggacacctacgacgcccttcacatgcaggccctgccccctcgc

SEQ ID NO: 3447 - DNA, 1089 bp, synthetic construct
  misc_feature 1..1089: note = Synthetic
  source 1..1089: mol_type = other DNA
atggccttaccagtgaccgccttgctcctgccgctggccttgctgctccacgccgccaggccggaggtgcagctgctggaaagcggcggaggcctggtccaacctggcggcagcctgagactgtcttgtgctgcttccggatctatcttcagcatcctggacatcggctggttccgccaggcccctggcaaggaacgggaattcgtgtccgcctatatcagcagcggcggatctacatactacagcgacagcgtgaaaggcagattcaccattagcagagataatagcaagaacaccctgtacctgcagatgaacagcctcaagcccgaggacaccgccgtgtactactgcgtggccacaatctttggcgatagaaccgagggccaggagcggtacgccttctggggccagggcacacaggtgaccgtgtccagcaccacgacgccagcgccgcggccaccaacaccggcgcccaccatcgcgtcgcagcccctgtccctgcgcccagaggcgtgccggccagcggcggggggcgcagtgcacacgagggggctggacttcgcctgtgatatctacatctgggcgcccttggccgggacttgtggggtccttctcctgtcactggttatcaccctttactgccggagggaccagaggctgccccccgatgcccacaagccccctgggggaggcagtttccggacccccatccaagaggagcaggccgacgcccactccaccctggccaagatcagagtgaagttcagcaggagcgcagacgcccccgcgtaccagcagggccagaaccagctctataacgagctcaatctaggacgaagagaggagtacgatgttttggacaagagacgtggccgggaccctgagatggggggaaagccgagaaggaagaaccctcaggaaggcctgtacaatgaactgcagaaagataagatggcggaggcctacagtgagattgggatgaaaggcgagcgccggaggggcaaggggcacgatggcctttaccagggtctcagtacagccaccaaggacacctacgacgcccttcacatgcaggccctgccccctcgc

SEQ ID NO: 3448 - DNA, 1083 bp, synthetic construct
  misc_feature 1..1083: note = Synthetic
  source 1..1083: mol_type = other DNA
atggccttaccagtgaccgccttgctcctgccgctggccttgctgctccacgccgccaggccggaggtgcagctgctggaaagcggaggcggcctggtccaaccaggcggatctctgcggctgagctgtgccgccagcggctctacaaccagcagctacttcatgggctggtttcggcaggcccctggcaaggaaagagagttcgtgtccgccatcatcacctcctccggcagcccctactacgccgacagcgtgaagggcagattcaccatcagcagagataatagcaagaacaccctgtacctccagatgaacagcctgaaacctgaggatacagccgtgtactactgcgctgctagacggtacggctctagagagacagacgactacggatattggggccagggcacccaggtgaccgtgtctagcaccacgacgccagcgccgcggccaccaacaccggcgcccaccatcgcgtcgcagcccctgtccctgcgcccagaggcgtgccggccagcggcggggggcgcagtgcacacgagggggctggacttcgcctgtgatatctacatctgggcgcccttggccgggacttgtggggtccttctcctgtcactggttatcaccctttactgccggagggaccagaggctgccccccgatgcccacaagccccctgggggaggcagtttccggacccccatccaagaggagcaggccgacgcccactccaccctggccaagatcagagtgaagttcagcaggagcgcagacgcccccgcgtaccagcagggccagaaccagctctataacgagctcaatctaggacgaagagaggagtacgatgttttggacaagagacgtggccgggaccctgagatggggggaaagccgagaaggaagaaccctcaggaaggcctgtacaatgaactgcagaaagataagatggcggaggcctacagtgagattgggatgaaaggcgagcgccggaggggcaaggggcacgatggcctttaccagggtctcagtacagccaccaaggacacctacgacgcccttcacatgcaggccctgccccctcgc

SEQ ID NO: 3449 - DNA, 1086 bp, synthetic construct
  misc_feature 1..1086: note = Synthetic
  source 1..1086: mol_type = other DNA
atggccttaccagtgaccgccttgctcctgccgctggccttgctgctccacgccgccaggccggaggtgcagctgctggaaagcggcggcggcctggtgcaacctggaggctctctgcggctgagctgcgctgcttctggctccgtctttagcagctacagcatgtggttcagacaggcccctggcaaggaaagagagttcgtgtccgccattatcaccagcggcggcagcacctactacgccgatagcgtgaaaggcagattcaccatcagccgggacaatagcaagaacaccctgtacctgcagatgaacagcctcaagcccgaggacaccgccgtgtactattgtgtggccgtgtacggcatcggcacaggccagtacatcggaacatacgacatctggggacagggcacacaggtgaccgtgtctagcaccacgacgccagcgccgcggccaccaacaccggcgcccaccatcgcgtcgcagcccctgtccctgcgcccagaggcgtgccggccagcggcggggggcgcagtgcacacgagggggctggacttcgcctgtgatatctacatctgggcgcccttggccgggacttgtggggtccttctcctgtcactggttatcaccctttactgccggagggaccagaggctgccccccgatgcccacaagccccctgggggaggcagtttccggacccccatccaagaggagcaggccgacgcccactccaccctggccaagatcagagtgaagttcagcaggagcgcagacgcccccgcgtaccagcagggccagaaccagctctataacgagctcaatctaggacgaagagaggagtacgatgttttggacaagagacgtggccgggaccctgagatggggggaaagccgagaaggaagaaccctcaggaaggcctgtacaatgaactgcagaaagataagatggcggaggcctacagtgagattgggatgaaaggcgagcgccggaggggcaaggggcacgatggcctttaccagggtctcagtacagccaccaaggacacctacgacgcccttcacatgcaggccctgccccctcgc

SEQ ID NO: 3450 - DNA, 1080 bp, synthetic construct
  misc_feature 1..1080: note = Synthetic
  source 1..1080: mol_type = other DNA
atggccttaccagtgaccgccttgctcctgccgctggccttgctgctccacgccgccaggccggaggtgcagctgctggaaagcggaggaggcctggtccaacctggaggatctctgcggctgagctgcgccgcttctggcagcctgctcagcatctacgacatgggctggtttagacaggcccctggcaaggaacgggaattcgtgtccgccagaatcggcaaaggcggctctacatactacgccgacagcgtgaagggcagattcaccatcagcagagataatagcaagaacaccctgtacctgcagatgaacagcctgaagcccgaggacacagccgtgtactattgtgctgtgctggtgggcgagggcgagagctacggctaccactactggggccagggcacccaggtgaccgtgtccagcaccacgacgccagcgccgcggccaccaacaccggcgcccaccatcgcgtcgcagcccctgtccctgcgcccagaggcgtgccggccagcggcggggggcgcagtgcacacgagggggctggacttcgcctgtgatatctacatctgggcgcccttggccgggacttgtggggtccttctcctgtcactggttatcaccctttactgccggagggaccagaggctgccccccgatgcccacaagccccctgggggaggcagtttccggacccccatccaagaggagcaggccgacgcccactccaccctggccaagatcagagtgaagttcagcaggagcgcagacgcccccgcgtaccagcagggccagaaccagctctataacgagctcaatctaggacgaagagaggagtacgatgttttggacaagagacgtggccgggaccctgagatggggggaaagccgagaaggaagaaccctcaggaaggcctgtacaatgaactgcagaaagataagatggcggaggcctacagtgagattgggatgaaaggcgagcgccggaggggcaaggggcacgatggcctttaccagggtctcagtacagccaccaaggacacctacgacgcccttcacatgcaggccctgccccctcgc

SEQ ID NO: 3451 - DNA, 1086 bp, synthetic construct
  misc_feature 1..1086: note = Synthetic
  source 1..1086: mol_type = other DNA
atggccttaccagtgaccgccttgctcctgccgctggccttgctgctccacgccgccaggccggaggtgcagctgctggaaagcggcggcggactggtccaacctggaggcagcctgagactgtcttgtgccgccagcggcatcggcctctccatctactttatgggctggttccggcaggcccctggcaaggaacgggaattcgtgtccgccatcatcagcagcagcggatctacctactacgccgacagcgtgaaaggcagattcaccatctctagagataatagcaagaacaccctgtacctgcagatgaacagcctgaagcccgaggacaccgccgtgtactactgcgctgctagaaccggctacagcgagtacgagcaggaggactacggctattggggccagggcacacaggtgacagtgtccagcaccacgacgccagcgccgcggccaccaacaccggcgcccaccatcgcgtcgcagcccctgtccctgcgcccagaggcgtgccggccagcggcggggggcgcagtgcacacgagggggctggacttcgcctgtgatatctacatctgggcgcccttggccgggacttgtggggtccttctcctgtcactggttatcaccctttactgccggagggaccagaggctgccccccgatgcccacaagccccctgggggaggcagtttccggacccccatccaagaggagcaggccgacgcccactccaccctggccaagatcagagtgaagttcagcaggagcgcagacgcccccgcgtaccagcagggccagaaccagctctataacgagctcaatctaggacgaagagaggagtacgatgttttggacaagagacgtggccgggaccctgagatggggggaaagccgagaaggaagaaccctcaggaaggcctgtacaatgaactgcagaaagataagatggcggaggcctacagtgagattgggatgaaaggcgagcgccggaggggcaaggggcacgatggcctttaccagggtctcagtacagccaccaaggacacctacgacgcccttcacatgcaggccctgccccctcgc

SEQ ID NO: 3452 - DNA, 1083 bp, synthetic construct
  misc_feature 1..1083: note = Synthetic
  source 1..1083: mol_type = other DNA
atggccttaccagtgaccgccttgctcctgccgctggccttgctgctccacgccgccaggccggaggtgcagctgctggaaagcggcggaggcctggtgcaacctggaggatctctcagactgagctgcgccgcttctggcagcatcttcagcagctccttcatcggctggttcagacaggcccctggcaaagagcgggaattcgtgtccgccgtgatcgcctcttctggcagcacctactacgccgacagcgtgaagggccggtttaccatcagcagagataatagcaagaacaccctgtacctgcagatgaacagcctgaagcccgaggacaccgccgtgtactattgtgctggcagattcggccagggcggcggcacagtcgagtacggctactggggccagggaacacaggtgaccgtgtccagcaccacgacgccagcgccgcggccaccaacaccggcgcccaccatcgcgtcgcagcccctgtccctgcgcccagaggcgtgccggccagcggcggggggcgcagtgcacacgagggggctggacttcgcctgtgatatctacatctgggcgcccttggccgggacttgtggggtccttctcctgtcactggttatcaccctttactgccggagggaccagaggctgccccccgatgcccacaagccccctgggggaggcagtttccggacccccatccaagaggagcaggccgacgcccactccaccctggccaagatcagagtgaagttcagcaggagcgcagacgcccccgcgtaccagcagggccagaaccagctctataacgagctcaatctaggacgaagagaggagtacgatgttttggacaagagacgtggccgggaccctgagatggggggaaagccgagaaggaagaaccctcaggaaggcctgtacaatgaactgcagaaagataagatggcggaggcctacagtgagattgggatgaaaggcgagcgccggaggggcaaggggcacgatggcctttaccagggtctcagtacagccaccaaggacacctacgacgcccttcacatgcaggccctgccccctcgc

SEQ ID NO: 3453 - DNA, 1083 bp, synthetic construct
  misc_feature 1..1083: note = Synthetic
  source 1..1083: mol_type = other DNA
atggccttaccagtgaccgccttgctcctgccgctggccttgctgctccacgccgccaggccggaagtgcagctgctggaaagcggcggaggcctggtccaacctggaggatctctcagactgagctgtgccgccagcggcagagtgttcagcttctacttcatgggctggttccggcaggcccctggcaaagagcgggaatttgtgtccggcgtgatcggcaagacaggctctacatactacaccgacagcgtgaagggcagattcaccatcagcagagataatagcaagaacaccctgtacctgcagatgaacagcctgaagcccgaggacaccgccgtgtactactgcgctgcttctgagtaccagggcaccggctacggcgagtttgcctattggggccagggaacacaggtgaccgtgtccagcaccacgacgccagcgccgcggccaccaacaccggcgcccaccatcgcgtcgcagcccctgtccctgcgcccagaggcgtgccggccagcggcggggggcgcagtgcacacgagggggctggacttcgcctgtgatatctacatctgggcgcccttggccgggacttgtggggtccttctcctgtcactggttatcaccctttactgccggagggaccagaggctgccccccgatgcccacaagccccctgggggaggcagtttccggacccccatccaagaggagcaggccgacgcccactccaccctggccaagatcagagtgaagttcagcaggagcgcagacgcccccgcgtaccagcagggccagaaccagctctataacgagctcaatctaggacgaagagaggagtacgatgttttggacaagagacgtggccgggaccctgagatggggggaaagccgagaaggaagaaccctcaggaaggcctgtacaatgaactgcagaaagataagatggcggaggcctacagtgagattgggatgaaaggcgagcgccggaggggcaaggggcacgatggcctttaccagggtctcagtacagccaccaaggacacctacgacgcccttcacatgcaggccctgccccctcgc

SEQ ID NO: 3454 - DNA, 1065 bp, synthetic construct
  misc_feature 1..1065: note = Synthetic
  source 1..1065: mol_type = other DNA
atggccttaccagtgaccgccttgctcctgccgctggccttgctgctccacgccgccaggccggaggtgcagctgctggaaagcggaggcggcctggtgcaacctggcggatctctgagactgagctgtgctgcttctggcagcctgttcgaggttgagcacatcggctggtttagacaggcccctggaaaagagcgggaattcgtgtccgcccaggtgaccggcggcggctacacctactatgccgacagcgtgaagggcagattcaccatcagcagagataatagcaagaacaccctgtacctgcagatgaacagcctcaagcccgaggacaccgccgtgtactactgctacgtgcggctggtcgaggaagcctactggggccagggcacacaggtgacagtgtccagcaccacgacgccagcgccgcggccaccaacaccggcgcccaccatcgcgtcgcagcccctgtccctgcgcccagaggcgtgccggccagcggcggggggcgcagtgcacacgagggggctggacttcgcctgtgatatctacatctgggcgcccttggccgggacttgtggggtccttctcctgtcactggttatcaccctttactgccggagggaccagaggctgccccccgatgcccacaagccccctgggggaggcagtttccggacccccatccaagaggagcaggccgacgcccactccaccctggccaagatcagagtgaagttcagcaggagcgcagacgcccccgcgtaccagcagggccagaaccagctctataacgagctcaatctaggacgaagagaggagtacgatgttttggacaagagacgtggccgggaccctgagatggggggaaagccgagaaggaagaaccctcaggaaggcctgtacaatgaactgcagaaagataagatggcggaggcctacagtgagattgggatgaaaggcgagcgccggaggggcaaggggcacgatggcctttaccagggtctcagtacagccaccaaggacacctacgacgcccttcacatgcaggccctgccccctcgc

SEQ ID NO: 3455 - DNA, 1089 bp, synthetic construct
  misc_feature 1..1089: note = Synthetic
  source 1..1089: mol_type = other DNA
atggccttaccagtgaccgccttgctcctgccgctggccttgctgctccacgccgccaggccggaggtgcagctgctggaaagcggcggaggactggtccagcctggcggcagcctgcggctgagctgcgccgcctctggcagaatcttcggcgagtacttcatcggatggtttcggcaggccccaggaaaagagcgcgagttcgtgtccgccattatcacaggcagcggcatcacccactacgccgacagcgtgaagggcagattcaccatctccagagacaactctaagaataccctgtacctgcagatgaacagcctcaagcctgaagatacagccgtgtactactgtgctgctagaacagactacaccaccggccaagagctgcccgaatatggctactggggccagggcacccaggtgaccgtgagcagcaccacgacgccagcgccgcggccaccaacaccggcgcccaccatcgcgtcgcagcccctgtccctgcgcccagaggcgtgccggccagcggcggggggcgcagtgcacacgagggggctggacttcgcctgtgatatctacatctgggcgcccttggccgggacttgtggggtccttctcctgtcactggttatcaccctttactgccggagggaccagaggctgccccccgatgcccacaagccccctgggggaggcagtttccggacccccatccaagaggagcaggccgacgcccactccaccctggccaagatcagagtgaagttcagcaggagcgcagacgcccccgcgtaccagcagggccagaaccagctctataacgagctcaatctaggacgaagagaggagtacgatgttttggacaagagacgtggccgggaccctgagatggggggaaagccgagaaggaagaaccctcaggaaggcctgtacaatgaactgcagaaagataagatggcggaggcctacagtgagattgggatgaaaggcgagcgccggaggggcaaggggcacgatggcctttaccagggtctcagtacagccaccaaggacacctacgacgcccttcacatgcaggccctgccccctcgc

SEQ ID NO: 3456 - DNA, 1074 bp, synthetic construct
  misc_feature 1..1074: note = Synthetic
  source 1..1074: mol_type = other DNA
atggccttaccagtgaccgccttgctcctgccgctggccttgctgctccacgccgccaggccggaggtgcagctgctggaaagcggcggcggcctcgtgcaacctggcggaagcctgagactgagctgcgccgcttctggctctatcgagagcatctacttcatcggctggttcagacaggcccctggcaaggaacgggaattcgtgtccgccgagtttatccccggaggcagcaccgtctacagcgacagcgtgaagggcagattcaccatcagcagagataacagcaagaacaccctgtacctgcagatgaacagcctgaaaccagaggacaccgccgtgtactactgtaatgccggcctggacgagggccggtactatacatactggggccagggcacacaggtgaccgtgtctagcaccacgacgccagcgccgcggccaccaacaccggcgcccaccatcgcgtcgcagcccctgtccctgcgcccagaggcgtgccggccagcggcggggggcgcagtgcacacgagggggctggacttcgcctgtgatatctacatctgggcgcccttggccgggacttgtggggtccttctcctgtcactggttatcaccctttactgccggagggaccagaggctgccccccgatgcccacaagccccctgggggaggcagtttccggacccccatccaagaggagcaggccgacgcccactccaccctggccaagatcagagtgaagttcagcaggagcgcagacgcccccgcgtaccagcagggccagaaccagctctataacgagctcaatctaggacgaagagaggagtacgatgttttggacaagagacgtggccgggaccctgagatggggggaaagccgagaaggaagaaccctcaggaaggcctgtacaatgaactgcagaaagataagatggcggaggcctacagtgagattgggatgaaaggcgagcgccggaggggcaaggggcacgatggcctttaccagggtctcagtacagccaccaaggacacctacgacgcccttcacatgcaggccctgccccctcgc

SEQ ID NO: 3457 - DNA, 1065 bp, synthetic construct
  misc_feature 1..1065: note = Synthetic
  source 1..1065: mol_type = other DNA
atggccttaccagtgaccgccttgctcctgccgctggccttgctgctccacgccgccaggccggaggttcagctgctggaaagcggaggcggcctggtgcaacctggcggcagcctgcggctgagctgtgccgcttctggcatcgaggtgtctagcagcgtggtcggctggtttagacaggcccctggcaaggaaagagagttcgtgtccgccagcggcgtgggcggatctacatactacgctgatagcgtgaaaggcagattcaccatcagccgggacaatagcaagaacaccctgtacctgcagatgaacagcctcaagcccgaggacaccgccgtgtattactgctacgccgtgtacctgaccatctacacatactggggacagggcacacaggtgaccgtgtcctccaccacgacgccagcgccgcggccaccaacaccggcgcccaccatcgcgtcgcagcccctgtccctgcgcccagaggcgtgccggccagcggcggggggcgcagtgcacacgagggggctggacttcgcctgtgatatctacatctgggcgcccttggccgggacttgtggggtccttctcctgtcactggttatcaccctttactgccggagggaccagaggctgccccccgatgcccacaagccccctgggggaggcagtttccggacccccatccaagaggagcaggccgacgcccactccaccctggccaagatcagagtgaagttcagcaggagcgcagacgcccccgcgtaccagcagggccagaaccagctctataacgagctcaatctaggacgaagagaggagtacgatgttttggacaagagacgtggccgggaccctgagatggggggaaagccgagaaggaagaaccctcaggaaggcctgtacaatgaactgcagaaagataagatggcggaggcctacagtgagattgggatgaaaggcgagcgccggaggggcaaggggcacgatggcctttaccagggtctcagtacagccaccaaggacacctacgacgcccttcacatgcaggccctgccccctcgc

SEQ ID NO: 3458 - DNA, 1068 bp, synthetic construct
  misc_feature 1..1068: note = Synthetic
  source 1..1068: mol_type = other DNA
atggccttaccagtgaccgccttgctcctgccgctggccttgctgctccacgccgccaggccggaggtgcagctcctggaaagcggcggaggcctggtgcaacctggaggctctctgagactgtcttgtgccgctagcggatttaccatctccagatacgccatggcctggttccggcaggcccctggcaaggaaagagagttcgtgtccggcagcatcttcgtgggcggcggcacatactatagagatagcgtgaaaggccgcttcaccatcagccgggacaatagcaagaacaccctgtacctgcagatgaacagcctgaagcccgaggacaccgccgtgtactactgctacgctacagtcggcgacagctactactactggggccagggcacccaggtgacagtgtctagcaccacgacgccagcgccgcggccaccaacaccggcgcccaccatcgcgtcgcagcccctgtccctgcgcccagaggcgtgccggccagcggcggggggcgcagtgcacacgagggggctggacttcgcctgtgatatctacatctgggcgcccttggccgggacttgtggggtccttctcctgtcactggttatcaccctttactgccggagggaccagaggctgccccccgatgcccacaagccccctgggggaggcagtttccggacccccatccaagaggagcaggccgacgcccactccaccctggccaagatcagagtgaagttcagcaggagcgcagacgcccccgcgtaccagcagggccagaaccagctctataacgagctcaatctaggacgaagagaggagtacgatgttttggacaagagacgtggccgggaccctgagatggggggaaagccgagaaggaagaaccctcaggaaggcctgtacaatgaactgcagaaagataagatggcggaggcctacagtgagattgggatgaaaggcgagcgccggaggggcaaggggcacgatggcctttaccagggtctcagtacagccaccaaggacacctacgacgcccttcacatgcaggccctgccccctcgc

SEQ ID NO: 3459 - DNA, 1065 bp, synthetic construct
  misc_feature 1..1065: note = Synthetic
  source 1..1065: mol_type = other DNA
atggccttaccagtgaccgccttgctcctgccgctggccttgctgctccacgccgccaggccggaggtgcagctgctggaaagcggcggaggcctggtgcaacctggaggcagcctgagactgagctgcgctgcttctggcagcctgttcagcgtggaacacatcggctggtttagacaggcccctggcaaagagcgggagttcgtgtccgcccaggttacaggcggcggctacacctactacgccgacagcgtgaagggcagattcaccatcagcagagataatagcaagaacaccctgtacctgcagatgaacagcctcaagcccgaggacaccgccgtgtactattgttacgtgcggctggtcgaggaagcctactggggccagggcacccaggtgacagtgtcttctaccacgacgccagcgccgcggccaccaacaccggcgcccaccatcgcgtcgcagcccctgtccctgcgcccagaggcgtgccggccagcggcggggggcgcagtgcacacgagggggctggacttcgcctgtgatatctacatctgggcgcccttggccgggacttgtggggtccttctcctgtcactggttatcaccctttactgccggagggaccagaggctgccccccgatgcccacaagccccctgggggaggcagtttccggacccccatccaagaggagcaggccgacgcccactccaccctggccaagatcagagtgaagttcagcaggagcgcagacgcccccgcgtaccagcagggccagaaccagctctataacgagctcaatctaggacgaagagaggagtacgatgttttggacaagagacgtggccgggaccctgagatggggggaaagccgagaaggaagaaccctcaggaaggcctgtacaatgaactgcagaaagataagatggcggaggcctacagtgagattgggatgaaaggcgagcgccggaggggcaaggggcacgatggcctttaccagggtctcagtacagccaccaaggacacctacgacgcccttcacatgcaggccctgccccctcgc

SEQ ID NO: 3460 - DNA, 1068 bp, synthetic construct
  misc_feature 1..1068: note = Synthetic
  source 1..1068: mol_type = other DNA
atggccttaccagtgaccgccttgctcctgccgctggccttgctgctccacgccgccaggccggaggtgcagctgctggaaagcggaggcggcctggtccaacctggaggcagcctgagactgagctgcgccgctagcggctttatcttcagcatctacgacatgggctggttccggcaggcccctggcaaagagcgggaattcgtgtccgccatctctacaacaggcggatctatctactacgccgacagcgtgaagggcagattcaccatcagcagagataacagcaagaacaccctgtacctgcagatgaactccctcaagcccgaggacaccgccgtgtactattgtaatgctgatccactggagagctacggctactggggccagggcacccaggtgaccgtgtctagcaccacgacgccagcgccgcggccaccaacaccggcgcccaccatcgcgtcgcagcccctgtccctgcgcccagaggcgtgccggccagcggcggggggcgcagtgcacacgagggggctggacttcgcctgtgatatctacatctgggcgcccttggccgggacttgtggggtccttctcctgtcactggttatcaccctttactgccggagggaccagaggctgccccccgatgcccacaagccccctgggggaggcagtttccggacccccatccaagaggagcaggccgacgcccactccaccctggccaagatcagagtgaagttcagcaggagcgcagacgcccccgcgtaccagcagggccagaaccagctctataacgagctcaatctaggacgaagagaggagtacgatgttttggacaagagacgtggccgggaccctgagatggggggaaagccgagaaggaagaaccctcaggaaggcctgtacaatgaactgcagaaagataagatggcggaggcctacagtgagattgggatgaaaggcgagcgccggaggggcaaggggcacgatggcctttaccagggtctcagtacagccaccaaggacacctacgacgcccttcacatgcaggccctgccccctcgc

SEQ ID NO: 3461 - DNA, 1074 bp, synthetic construct
  misc_feature 1..1074: note = Synthetic
  source 1..1074: mol_type = other DNA
atggccttaccagtgaccgccttgctcctgccgctggccttgctgctccacgccgccaggccggaggtgcagctgctggaatctggcggcggactggtgcaacctggcggcagcctgagactgagctgcgccgcttctggctctgtgttcagctcctactttatcggctggttccggcaggcccctggaaaggaaagagagttcgtgtccgccgtgatctccagcagcggaagcacctactacgccgacagcgtgaaaggcagattcaccatcagccgggacaatagcaagaacaccctgtacctgcagatgaacagcctcaagcccgaggacacagctgtctactattgtgtggccagagaagatgtgggcgagccatacggctactggggccagggcacacaggtgaccgtgtctagcaccacgacgccagcgccgcggccaccaacaccggcgcccaccatcgcgtcgcagcccctgtccctgcgcccagaggcgtgccggccagcggcggggggcgcagtgcacacgagggggctggacttcgcctgtgatatctacatctgggcgcccttggccgggacttgtggggtccttctcctgtcactggttatcaccctttactgccggagggaccagaggctgccccccgatgcccacaagccccctgggggaggcagtttccggacccccatccaagaggagcaggccgacgcccactccaccctggccaagatcagagtgaagttcagcaggagcgcagacgcccccgcgtaccagcagggccagaaccagctctataacgagctcaatctaggacgaagagaggagtacgatgttttggacaagagacgtggccgggaccctgagatggggggaaagccgagaaggaagaaccctcaggaaggcctgtacaatgaactgcagaaagataagatggcggaggcctacagtgagattgggatgaaaggcgagcgccggaggggcaaggggcacgatggcctttaccagggtctcagtacagccaccaaggacacctacgacgcccttcacatgcaggccctgccccctcgc

SEQ ID NO: 3462 - protein, 584 aa, synthetic construct
  REGION 1..584: note = Synthetic
MALPVTALLLPLALLLHAARPEVQLLESGGGLVQPGGSLRLSCAASGRGFTSYYMGWFRQAPGKEREFVSAVIFPEGYRYYADSVKGRFTISRDNSKNTLYLQMNSLKPEDTAVYYCAKYTGFGEDAYRYWGQGTQVTVSSTTTPAPRPPTPAPTIASQPLSLRPEACRPAAGGAVHTRGLDFACDIYIWAPLAGTCGVLLLSLVITLYCRRDQRLPPDAHKPPGGGSFRTPIQEEQADAHSTLAKIRVKFSRSADAPAYQQGQNQLYNELNLGRREEYDVLDKRRGRDPEMGGKPRRKNPQEGLYNELQKDKMAEAYSEIGMKGERRRGKGHDGLYQGLSTATKDTYDALHMQALPPRGSGEGRGSLLTCGDVEENPGPMALPVTALLLPLALLLHAARPNWVNVISDLKKIEDLIQSMHIDATLYTESDVHPSCKVTAMKCFLLELQVISLESGDASIHDTVENLIILANNSLSSNGNVTESGCKECEELEEKNIKEFLQSFVHIVQMFINTSTTTPAPRPPTPAPTIASQPLSLRPEACRPAAGGAVHTRGLDFACDIYIWAPLAGTCGVLLLSLVITLYC

SEQ ID NO: 3463 - protein, 583 aa, synthetic construct
  REGION 1..583: note = Synthetic
MALPVTALLLPLALLLHAARPEVQLLESGGGLVQPGGSLRLSCAASGLTFSIHTVGWFRQAPGKEREFVSAALGSGGRPYYRDSVKGRFTISRDNSKNTLYLQMNSLKPEDTAVYYCYVDVGTGLYYGYWGQGTQVTVSSTTTPAPRPPTPAPTIASQPLSLRPEACRPAAGGAVHTRGLDFACDIYIWAPLAGTCGVLLLSLVITLYCRRDQRLPPDAHKPPGGGSFRTPIQEEQADAHSTLAKIRVKFSRSADAPAYQQGQNQLYNELNLGRREEYDVLDKRRGRDPEMGGKPRRKNPQEGLYNELQKDKMAEAYSEIGMKGERRRGKGHDGLYQGLSTATKDTYDALHMQALPPRGSGEGRGSLLTCGDVEENPGPMALPVTALLLPLALLLHAARPNWVNVISDLKKIEDLIQSMHIDATLYTESDVHPSCKVTAMKCFLLELQVISLESGDASIHDTVENLIILANNSLSSNGNVTESGCKECEELEEKNIKEFLQSFVHIVQMFINTSTTTPAPRPPTPAPTIASQPLSLRPEACRPAAGGAVHTRGLDFACDIYIWAPLAGTCGVLLLSLVITLYC

SEQ ID NO: 3464 - protein, 586 aa, synthetic construct
  REGION 1..586: note = Synthetic
MALPVTALLLPLALLLHAARPEVQLLESGGGLVQPGGSLRLSCAASGRIFSSYFMGWFRQAPGKEREFVSAHISSEGSTYYRDSVKGRFTISRDNSKNTLYLQMNSLKPEDTAVYYCAAREYADTQRGEYAYWGQGTQVTVSSTTTPAPRPPTPAPTIASQPLSLRPEACRPAAGGAVHTRGLDFACDIYIWAPLAGTCGVLLLSLVITLYCRRDQRLPPDAHKPPGGGSFRTPIQEEQADAHSTLAKIRVKFSRSADAPAYQQGQNQLYNELNLGRREEYDVLDKRRGRDPEMGGKPRRKNPQEGLYNELQKDKMAEAYSEIGMKGERRRGKGHDGLYQGLSTATKDTYDALHMQALPPRGSGEGRGSLLTCGDVEENPGPMALPVTALLLPLALLLHAARPNWVNVISDLKKIEDLIQSMHIDATLYTESDVHPSCKVTAMKCFLLELQVISLESGDASIHDTVENLIILANNSLSSNGNVTESGCKECEELEEKNIKEFLQSFVHIVQMFINTSTTTPAPRPPTPAPTIASQPLSLRPEACRPAAGGAVHTRGLDFACDIYIWAPLAGTCGVLLLSLVITLYC

SEQ ID NO: 3465 - protein, 581 aa, synthetic construct
  REGION 1..581: note = Synthetic
MALPVTALLLPLALLLHAARPEVQLLESGGGLVQPGGSLRLSCAASGSIVSSYAMGWFRQAPGKEREFVSSAIGKGGVTIYADSVKGRFTISRDNSKNTLYLQMNSLKPEDTAVYYCATDESTYRDYWGQGTQVTVSSTTTPAPRPPTPAPTIASQPLSLRPEACRPAAGGAVHTRGLDFACDIYIWAPLAGTCGVLLLSLVITLYCRRDQRLPPDAHKPPGGGSFRTPIQEEQADAHSTLAKIRVKFSRSADAPAYQQGQNQLYNELNLGRREEYDVLDKRRGRDPEMGGKPRRKNPQEGLYNELQKDKMAEAYSEIGMKGERRRGKGHDGLYQGLSTATKDTYDALHMQALPPRGSGEGRGSLLTCGDVEENPGPMALPVTALLLPLALLLHAARPNWVNVISDLKKIEDLIQSMHIDATLYTESDVHPSCKVTAMKCFLLELQVISLESGDASIHDTVENLIILANNSLSSNGNVTESGCKECEELEEKNIKEFLQSFVHIVQMFINTSTTTPAPRPPTPAPTIASQPLSLRPEACRPAAGGAVHTRGLDFACDIYIWAPLAGTCGVLLLSLVITLYC

SEQ ID NO: 3466 - protein, 580 aa, synthetic construct
  REGION 1..580: note = Synthetic
MALPVTALLLPLALLLHAARPEVQLLESGGGLVQPGGSLRLSCAASGSLFQVEHIGWFRQAPGKERDFVSAQVTGGGYTYYADSVKGRFTISRDNSKNTLYLQMNSLKPEDTAVYYCYVRLVEEAYWGQGTQVTVSSTTTPAPRPPTPAPTIASQPLSLRPEACRPAAGGAVHTRGLDFACDIYIWAPLAGTCGVLLLSLVITLYCRRDQRLPPDAHKPPGGGSFRTPIQEEQADAHSTLAKIRVKFSRSADAPAYQQGQNQLYNELNLGRREEYDVLDKRRGRDPEMGGKPRRKNPQEGLYNELQKDKMAEAYSEIGMKGERRRGKGHDGLYQGLSTATKDTYDALHMQALPPRGSGEGRGSLLTCGDVEENPGPMALPVTALLLPLALLLHAARPNWVNVISDLKKIEDLIQSMHIDATLYTESDVHPSCKVTAMKCFLLELQVISLESGDASIHDTVENLIILANNSLSSNGNVTESGCKECEELEEKNIKEFLQSFVHIVQMFINTSTTTPAPRPPTPAPTIASQPLSLRPEACRPAAGGAVHTRGLDFACDIYIWAPLAGTCGVLLLSLVITLYC

SEQ ID NO: 3467 - protein, 586 aa, synthetic construct
  REGION 1..586: note = Synthetic
MALPVTALLLPLALLLHAARPEVQLLESGGGLVQPGGSLRLSCAASGTTFASSFMGWFRQAPGKEREFVSAIVFPGGSTYYADSVKGRFTISRDNSKNTLYLQMNSLKPEDTAVYYCAARRYELVDRLEYAYWGQGTQVTVSSTTTPAPRPPTPAPTIASQPLSLRPEACRPAAGGAVHTRGLDFACDIYIWAPLAGTCGVLLLSLVITLYCRRDQRLPPDAHKPPGGGSFRTPIQEEQADAHSTLAKIRVKFSRSADAPAYQQGQNQLYNELNLGRREEYDVLDKRRGRDPEMGGKPRRKNPQEGLYNELQKDKMAEAYSEIGMKGERRRGKGHDGLYQGLSTATKDTYDALHMQALPPRGSGEGRGSLLTCGDVEENPGPMALPVTALLLPLALLLHAARPNWVNVISDLKKIEDLIQSMHIDATLYTESDVHPSCKVTAMKCFLLELQVISLESGDASIHDTVENLIILANNSLSSNGNVTESGCKECEELEEKNIKEFLQSFVHIVQMFINTSTTTPAPRPPTPAPTIASQPLSLRPEACRPAAGGAVHTRGLDFACDIYIWAPLAGTCGVLLLSLVITLYC

SEQ ID NO: 3468 - protein, 581 aa, synthetic construct
  REGION 1..581: note = Synthetic
MALPVTALLLPLALLLHAARPEVQLLESGGGLVQPGGSLRLSCAASGSVFSSFTIGWFRQAPGKEREFVSAIVTSTGSTYYADSVKGRFTISRDNSKNTLYLQMNSLKPEDTAVYYCNVRTQEDYYYWGQGTQVTVSSTTTPAPRPPTPAPTIASQPLSLRPEACRPAAGGAVHTRGLDFACDIYIWAPLAGTCGVLLLSLVITLYCRRDQRLPPDAHKPPGGGSFRTPIQEEQADAHSTLAKIRVKFSRSADAPAYQQGQNQLYNELNLGRREEYDVLDKRRGRDPEMGGKPRRKNPQEGLYNELQKDKMAEAYSEIGMKGERRRGKGHDGLYQGLSTATKDTYDALHMQALPPRGSGEGRGSLLTCGDVEENPGPMALPVTALLLPLALLLHAARPNWVNVISDLKKIEDLIQSMHIDATLYTESDVHPSCKVTAMKCFLLELQVISLESGDASIHDTVENLIILANNSLSSNGNVTESGCKECEELEEKNIKEFLQSFVHIVQMFINTSTTTPAPRPPTPAPTIASQPLSLRPEACRPAAGGAVHTRGLDFACDIYIWAPLAGTCGVLLLSLVITLYC

SEQ ID NO: 3469 - protein, 586 aa, synthetic construct
  REGION 1..586: note = Synthetic
MALPVTALLLPLALLLHAARPEVQLLESGGGLVQPGGSLRLSCAASGSIFGSHFMGWFRQAPGKEREFVSAAVTSGGSTYYADSVKGRFTISRDNSKNTLYLQMNSLKPEDTAVYYCAARTYQSTYQPEYAYWGQGTQVTVSSTTTPAPRPPTPAPTIASQPLSLRPEACRPAAGGAVHTRGLDFACDIYIWAPLAGTCGVLLLSLVITLYCRRDQRLPPDAHKPPGGGSFRTPIQEEQADAHSTLAKIRVKFSRSADAPAYQQGQNQLYNELNLGRREEYDVLDKRRGRDPEMGGKPRRKNPQEGLYNELQKDKMAEAYSEIGMKGERRRGKGHDGLYQGLSTATKDTYDALHMQALPPRGSGEGRGSLLTCGDVEENPGPMALPVTALLLPLALLLHAARPNWVNVISDLKKIEDLIQSMHIDATLYTESDVHPSCKVTAMKCFLLELQVISLESGDASIHDTVENLIILANNSLSSNGNVTESGCKECEELEEKNIKEFLQSFVHIVQMFINTSTTTPAPRPPTPAPTIASQPLSLRPEACRPAAGGAVHTRGLDFACDIYIWAPLAGTCGVLLLSLVITLYC

SEQ ID NO: 3470 - protein, 588 aa, synthetic construct
  REGION 1..588: note = Synthetic
MALPVTALLLPLALLLHAARPEVQLLESGGGLVQPGGSLRLSCAASGSIFSILDIGWFRQAPGKEREFVSAYISSGGSTYYSDSVKGRFTISRDNSKNTLYLQMNSLKPEDTAVYYCVATIFGDRTEGQERYAFWGQGTQVTVSSTTTPAPRPPTPAPTIASQPLSLRPEACRPAAGGAVHTRGLDFACDIYIWAPLAGTCGVLLLSLVITLYCRRDQRLPPDAHKPPGGGSFRTPIQEEQADAHSTLAKIRVKFSRSADAPAYQQGQNQLYNELNLGRREEYDVLDKRRGRDPEMGGKPRRKNPQEGLYNELQKDKMAEAYSEIGMKGERRRGKGHDGLYQGLSTATKDTYDALHMQALPPRGSGEGRGSLLTCGDVEENPGPMALPVTALLLPLALLLHAARPNWVNVISDLKKIEDLIQSMHIDATLYTESDVHPSCKVTAMKCFLLELQVISLESGDASIHDTVENLIILANNSLSSNGNVTESGCKECEELEEKNIKEFLQSFVHIVQMFINTSTTTPAPRPPTPAPTIASQPLSLRPEACRPAAGGAVHTRGLDFACDIYIWAPLAGTCGVLLLSLVITLYC

SEQ ID NO: 3471 - protein, 586 aa, synthetic construct
  REGION 1..586: note = Synthetic
MALPVTALLLPLALLLHAARPEVQLLESGGGLVQPGGSLRLSCAASGSTTSSYFMGWFRQAPGKEREFVSAIITSSGSPYYADSVKGRFTISRDNSKNTLYLQMNSLKPEDTAVYYCAARRYGSRETDDYGYWGQGTQVTVSSTTTPAPRPPTPAPTIASQPLSLRPEACRPAAGGAVHTRGLDFACDIYIWAPLAGTCGVLLLSLVITLYCRRDQRLPPDAHKPPGGGSFRTPIQEEQADAHSTLAKIRVKFSRSADAPAYQQGQNQLYNELNLGRREEYDVLDKRRGRDPEMGGKPRRKNPQEGLYNELQKDKMAEAYSEIGMKGERRRGKGHDGLYQGLSTATKDTYDALHMQALPPRGSGEGRGSLLTCGDVEENPGPMALPVTALLLPLALLLHAARPNWVNVISDLKKIEDLIQSMHIDATLYTESDVHPSCKVTAMKCFLLELQVISLESGDASIHDTVENLIILANNSLSSNGNVTESGCKECEELEEKNIKEFLQSFVHIVQMFINTSTTTPAPRPPTPAPTIASQPLSLRPEACRPAAGGAVHTRGLDFACDIYIWAPLAGTCGVLLLSLVITLYC

SEQ ID NO: 3472 - protein, 587 aa, synthetic construct
  REGION 1..587: note = Synthetic
MALPVTALLLPLALLLHAARPEVQLLESGGGLVQPGGSLRLSCAASGSVFSSYSMWFRQAPGKEREFVSAIITSGGSTYYADSVKGRFTISRDNSKNTLYLQMNSLKPEDTAVYYCVAVYGIGTGQYIGTYDIWGQGTQVTVSSTTTPAPRPPTPAPTIASQPLSLRPEACRPAAGGAVHTRGLDFACDIYIWAPLAGTCGVLLLSLVITLYCRRDQRLPPDAHKPPGGGSFRTPIQEEQADAHSTLAKIRVKFSRSADAPAYQQGQNQLYNELNLGRREEYDVLDKRRGRDPEMGGKPRRKNPQEGLYNELQKDKMAEAYSEIGMKGERRRGKGHDGLYQGLSTATKDTYDALHMQALPPRGSGEGRGSLLTCGDVEENPGPMALPVTALLLPLALLLHAARPNWVNVISDLKKIEDLIQSMHIDATLYTESDVHPSCKVTAMKCFLLELQVISLESGDASIHDTVENLIILANNSLSSNGNVTESGCKECEELEEKNIKEFLQSFVHIVQMFINTSTTTPAPRPPTPAPTIASQPLSLRPEACRPAAGGAVHTRGLDFACDIYIWAPLAGTCGVLLLSLVITLYC

SEQ ID NO: 3473 - protein, 585 aa, synthetic construct
  REGION 1..585: note = Synthetic
MALPVTALLLPLALLLHAARPEVQLLESGGGLVQPGGSLRLSCAASGSLLSIYDMGWFRQAPGKEREFVSARIGKGGSTYYADSVKGRFTISRDNSKNTLYLQMNSLKPEDTAVYYCAVLVGEGESYGYHYWGQGTQVTVSSTTTPAPRPPTPAPTIASQPLSLRPEACRPAAGGAVHTRGLDFACDIYIWAPLAGTCGVLLLSLVITLYCRRDQRLPPDAHKPPGGGSFRTPIQEEQADAHSTLAKIRVKFSRSADAPAYQQGQNQLYNELNLGRREEYDVLDKRRGRDPEMGGKPRRKNPQEGLYNELQKDKMAEAYSEIGMKGERRRGKGHDGLYQGLSTATKDTYDALHMQALPPRGSGEGRGSLLTCGDVEENPGPMALPVTALLLPLALLLHAARPNWVNVISDLKKIEDLIQSMHIDATLYTESDVHPSCKVTAMKCFLLELQVISLESGDASIHDTVENLIILANNSLSSNGNVTESGCKECEELEEKNIKEFLQSFVHIVQMFINTSTTTPAPRPPTPAPTIASQPLSLRPEACRPAAGGAVHTRGLDFACDIYIWAPLAGTCGVLLLSLVITLYC

SEQ ID NO: 3474 - protein, 587 aa, synthetic construct
  REGION 1..587: note = Synthetic
MALPVTALLLPLALLLHAARPEVQLLESGGGLVQPGGSLRLSCAASGIGLSIYFMGWFRQAPGKEREFVSAIISSSGSTYYADSVKGRFTISRDNSKNTLYLQMNSLKPEDTAVYYCAARTGYSEYEQEDYGYWGQGTQVTVSSTTTPAPRPPTPAPTIASQPLSLRPEACRPAAGGAVHTRGLDFACDIYIWAPLAGTCGVLLLSLVITLYCRRDQRLPPDAHKPPGGGSFRTPIQEEQADAHSTLAKIRVKFSRSADAPAYQQGQNQLYNELNLGRREEYDVLDKRRGRDPEMGGKPRRKNPQEGLYNELQKDKMAEAYSEIGMKGERRRGKGHDGLYQGLSTATKDTYDALHMQALPPRGSGEGRGSLLTCGDVEENPGPMALPVTALLLPLALLLHAARPNWVNVISDLKKIEDLIQSMHIDATLYTESDVHPSCKVTAMKCFLLELQVISLESGDASIHDTVENLIILANNSLSSNGNVTESGCKECEELEEKNIKEFLQSFVHIVQMFINTSTTTPAPRPPTPAPTIASQPLSLRPEACRPAAGGAVHTRGLDFACDIYIWAPLAGTCGVLLLSLVITLYC

SEQ ID NO: 3475 - protein, 586 aa, synthetic construct
  REGION 1..586: note = Synthetic
MALPVTALLLPLALLLHAARPEVQLLESGGGLVQPGGSLRLSCAASGSIFSSSFIGWFRQAPGKEREFVSAVIASSGSTYYADSVKGRFTISRDNSKNTLYLQMNSLKPEDTAVYYCAGRFGQGGGTVEYGYWGQGTQVTVSSTTTPAPRPPTPAPTIASQPLSLRPEACRPAAGGAVHTRGLDFACDIYIWAPLAGTCGVLLLSLVITLYCRRDQRLPPDAHKPPGGGSFRTPIQEEQADAHSTLAKIRVKFSRSADAPAYQQGQNQLYNELNLGRREEYDVLDKRRGRDPEMGGKPRRKNPQEGLYNELQKDKMAEAYSEIGMKGERRRGKGHDGLYQGLSTATKDTYDALHMQALPPRGSGEGRGSLLTCGDVEENPGPMALPVTALLLPLALLLHAARPNWVNVISDLKKIEDLIQSMHIDATLYTESDVHPSCKVTAMKCFLLELQVISLESGDASIHDTVENLIILANNSLSSNGNVTESGCKECEELEEKNIKEFLQSFVHIVQMFINTSTTTPAPRPPTPAPTIASQPLSLRPEACRPAAGGAVHTRGLDFACDIYIWAPLAGTCGVLLLSLVITLYC

SEQ ID NO: 3476 - protein, 586 aa, synthetic construct
  REGION 1..586: note = Synthetic
MALPVTALLLPLALLLHAARPEVQLLESGGGLVQPGGSLRLSCAASGRVFSFYFMGWFRQAPGKEREFVSGVIGKTGSTYYTDSVKGRFTISRDNSKNTLYLQMNSLKPEDTAVYYCAASEYQGTGYGEFAYWGQGTQVTVSSTTTPAPRPPTPAPTIASQPLSLRPEACRPAAGGAVHTRGLDFACDIYIWAPLAGTCGVLLLSLVITLYCRRDQRLPPDAHKPPGGGSFRTPIQEEQADAHSTLAKIRVKFSRSADAPAYQQGQNQLYNELNLGRREEYDVLDKRRGRDPEMGGKPRRKNPQEGLYNELQKDKMAEAYSEIGMKGERRRGKGHDGLYQGLSTATKDTYDALHMQALPPRGSGEGRGSLLTCGDVEENPGPMALPVTALLLPLALLLHAARPNWVNVISDLKKIEDLIQSMHIDATLYTESDVHPSCKVTAMKCFLLELQVISLESGDASIHDTVENLIILANNSLSSNGNVTESGCKECEELEEKNIKEFLQSFVHIVQMFINTSTTTPAPRPPTPAPTIASQPLSLRPEACRPAAGGAVHTRGLDFACDIYIWAPLAGTCGVLLLSLVITLYC

SEQ ID NO: 3477 - protein, 580 aa, synthetic construct
  REGION 1..580: note = Synthetic
MALPVTALLLPLALLLHAARPEVQLLESGGGLVQPGGSLRLSCAASGSLFEVEHIGWFRQAPGKEREFVSAQVTGGGYTYYADSVKGRFTISRDNSKNTLYLQMNSLKPEDTAVYYCYVRLVEEAYWGQGTQVTVSSTTTPAPRPPTPAPTIASQPLSLRPEACRPAAGGAVHTRGLDFACDIYIWAPLAGTCGVLLLSLVITLYCRRDQRLPPDAHKPPGGGSFRTPIQEEQADAHSTLAKIRVKFSRSADAPAYQQGQNQLYNELNLGRREEYDVLDKRRGRDPEMGGKPRRKNPQEGLYNELQKDKMAEAYSEIGMKGERRRGKGHDGLYQGLSTATKDTYDALHMQALPPRGSGEGRGSLLTCGDVEENPGPMALPVTALLLPLALLLHAARPNWVNVISDLKKIEDLIQSMHIDATLYTESDVHPSCKVTAMKCFLLELQVISLESGDASIHDTVENLIILANNSLSSNGNVTESGCKECEELEEKNIKEFLQSFVHIVQMFINTSTTTPAPRPPTPAPTIASQPLSLRPEACRPAAGGAVHTRGLDFACDIYIWAPLAGTCGVLLLSLVITLYC

SEQ ID NO: 3478 - protein, 588 aa, synthetic construct
  REGION 1..588: note = Synthetic
MALPVTALLLPLALLLHAARPEVQLLESGGGLVQPGGSLRLSCAASGRIFGEYFIGWFRQAPGKEREFVSAIITGSGITHYADSVKGRFTISRDNSKNTLYLQMNSLKPEDTAVYYCAARTDYTTGQELPEYGYWGQGTQVTVSSTTTPAPRPPTPAPTIASQPLSLRPEACRPAAGGAVHTRGLDFACDIYIWAPLAGTCGVLLLSLVITLYCRRDQRLPPDAHKPPGGGSFRTPIQEEQADAHSTLAKIRVKFSRSADAPAYQQGQNQLYNELNLGRREEYDVLDKRRGRDPEMGGKPRRKNPQEGLYNELQKDKMAEAYSEIGMKGERRRGKGHDGLYQGLSTATKDTYDALHMQALPPRGSGEGRGSLLTCGDVEENPGPMALPVTALLLPLALLLHAARPNWVNVISDLKKIEDLIQSMHIDATLYTESDVHPSCKVTAMKCFLLELQVISLESGDASIHDTVENLIILANNSLSSNGNVTESGCKECEELEEKNIKEFLQSFVHIVQMFINTSTTTPAPRPPTPAPTIASQPLSLRPEACRPAAGGAVHTRGLDFACDIYIWAPLAGTCGVLLLSLVITLYC

SEQ ID NO: 3479 - protein, 583 aa, synthetic construct
  REGION 1..583: note = Synthetic
MALPVTALLLPLALLLHAARPEVQLLESGGGLVQPGGSLRLSCAASGSIESIYFIGWFRQAPGKEREFVSAEFIPGGSTVYSDSVKGRFTISRDNSKNTLYLQMNSLKPEDTAVYYCNAGLDEGRYYTYWGQGTQVTVSSTTTPAPRPPTPAPTIASQPLSLRPEACRPAAGGAVHTRGLDFACDIYIWAPLAGTCGVLLLSLVITLYCRRDQRLPPDAHKPPGGGSFRTPIQEEQADAHSTLAKIRVKFSRSADAPAYQQGQNQLYNELNLGRREEYDVLDKRRGRDPEMGGKPRRKNPQEGLYNELQKDKMAEAYSEIGMKGERRRGKGHDGLYQGLSTATKDTYDALHMQALPPRGSGEGRGSLLTCGDVEENPGPMALPVTALLLPLALLLHAARPNWVNVISDLKKIEDLIQSMHIDATLYTESDVHPSCKVTAMKCFLLELQVISLESGDASIHDTVENLIILANNSLSSNGNVTESGCKECEELEEKNIKEFLQSFVHIVQMFINTSTTTPAPRPPTPAPTIASQPLSLRPEACRPAAGGAVHTRGLDFACDIYIWAPLAGTCGVLLLSLVITLYC

SEQ ID NO: 3480 - protein, 580 aa, synthetic construct
  REGION 1..580: note = Synthetic
MALPVTALLLPLALLLHAARPEVQLLESGGGLVQPGGSLRLSCAASGIEVSSSVVGWFRQAPGKEREFVSASGVGGSTYYADSVKGRFTISRDNSKNTLYLQMNSLKPEDTAVYYCYAVYLTIYTYWGQGTQVTVSSTTTPAPRPPTPAPTIASQPLSLRPEACRPAAGGAVHTRGLDFACDIYIWAPLAGTCGVLLLSLVITLYCRRDQRLPPDAHKPPGGGSFRTPIQEEQADAHSTLAKIRVKFSRSADAPAYQQGQNQLYNELNLGRREEYDVLDKRRGRDPEMGGKPRRKNPQEGLYNELQKDKMAEAYSEIGMKGERRRGKGHDGLYQGLSTATKDTYDALHMQALPPRGSGEGRGSLLTCGDVEENPGPMALPVTALLLPLALLLHAARPNWVNVISDLKKIEDLIQSMHIDATLYTESDVHPSCKVTAMKCFLLELQVISLESGDASIHDTVENLIILANNSLSSNGNVTESGCKECEELEEKNIKEFLQSFVHIVQMFINTSTTTPAPRPPTPAPTIASQPLSLRPEACRPAAGGAVHTRGLDFACDIYIWAPLAGTCGVLLLSLVITLYC

SEQ ID NO: 3481 - protein, 581 aa, synthetic construct
  REGION 1..581: note = Synthetic
MALPVTALLLPLALLLHAARPEVQLLESGGGLVQPGGSLRLSCAASGFTISRYAMAWFRQAPGKEREFVSGSIFVGGGTYYRDSVKGRFTISRDNSKNTLYLQMNSLKPEDTAVYYCYATVGDSYYYWGQGTQVTVSSTTTPAPRPPTPAPTIASQPLSLRPEACRPAAGGAVHTRGLDFACDIYIWAPLAGTCGVLLLSLVITLYCRRDQRLPPDAHKPPGGGSFRTPIQEEQADAHSTLAKIRVKFSRSADAPAYQQGQNQLYNELNLGRREEYDVLDKRRGRDPEMGGKPRRKNPQEGLYNELQKDKMAEAYSEIGMKGERRRGKGHDGLYQGLSTATKDTYDALHMQALPPRGSGEGRGSLLTCGDVEENPGPMALPVTALLLPLALLLHAARPNWVNVISDLKKIEDLIQSMHIDATLYTESDVHPSCKVTAMKCFLLELQVISLESGDASIHDTVENLIILANNSLSSNGNVTESGCKECEELEEKNIKEFLQSFVHIVQMFINTSTTTPAPRPPTPAPTIASQPLSLRPEACRPAAGGAVHTRGLDFACDIYIWAPLAGTCGVLLLSLVITLYC

SEQ ID NO: 3482 - protein, 580 aa, synthetic construct
  REGION 1..580: note = Synthetic
MALPVTALLLPLALLLHAARPEVQLLESGGGLVQPGGSLRLSCAASGSLFSVEHIGWFRQAPGKEREFVSAQVTGGGYTYYADSVKGRFTISRDNSKNTLYLQMNSLKPEDTAVYYCYVRLVEEAYWGQGTQVTVSSTTTPAPRPPTPAPTIASQPLSLRPEACRPAAGGAVHTRGLDFACDIYIWAPLAGTCGVLLLSLVITLYCRRDQRLPPDAHKPPGGGSFRTPIQEEQADAHSTLAKIRVKFSRSADAPAYQQGQNQLYNELNLGRREEYDVLDKRRGRDPEMGGKPRRKNPQEGLYNELQKDKMAEAYSEIGMKGERRRGKGHDGLYQGLSTATKDTYDALHMQALPPRGSGEGRGSLLTCGDVEENPGPMALPVTALLLPLALLLHAARPNWVNVISDLKKIEDLIQSMHIDATLYTESDVHPSCKVTAMKCFLLELQVISLESGDASIHDTVENLIILANNSLSSNGNVTESGCKECEELEEKNIKEFLQSFVHIVQMFINTSTTTPAPRPPTPAPTIASQPLSLRPEACRPAAGGAVHTRGLDFACDIYIWAPLAGTCGVLLLSLVITLYC

SEQ ID NO: 3483 - protein, 581 aa, synthetic construct
  REGION 1..581: note = Synthetic
MALPVTALLLPLALLLHAARPEVQLLESGGGLVQPGGSLRLSCAASGFIFSIYDMGWFRQAPGKEREFVSAISTTGGSIYYADSVKGRFTISRDNSKNTLYLQMNSLKPEDTAVYYCNADPLESYGYWGQGTQVTVSSTTTPAPRPPTPAPTIASQPLSLRPEACRPAAGGAVHTRGLDFACDIYIWAPLAGTCGVLLLSLVITLYCRRDQRLPPDAHKPPGGGSFRTPIQEEQADAHSTLAKIRVKFSRSADAPAYQQGQNQLYNELNLGRREEYDVLDKRRGRDPEMGGKPRRKNPQEGLYNELQKDKMAEAYSEIGMKGERRRGKGHDGLYQGLSTATKDTYDALHMQALPPRGSGEGRGSLLTCGDVEENPGPMALPVTALLLPLALLLHAARPNWVNVISDLKKIEDLIQSMHIDATLYTESDVHPSCKVTAMKCFLLELQVISLESGDASIHDTVENLIILANNSLSSNGNVTESGCKECEELEEKNIKEFLQSFVHIVQMFINTSTTTPAPRPPTPAPTIASQPLSLRPEACRPAAGGAVHTRGLDFACDIYIWAPLAGTCGVLLLSLVITLYC

SEQ ID NO: 3484 - protein, 583 aa, synthetic construct
  REGION 1..583: note = Synthetic
MALPVTALLLPLALLLHAARPEVQLLESGGGLVQPGGSLRLSCAASGSVFSSYFIGWFRQAPGKEREFVSAVISSSGSTYYADSVKGRFTISRDNSKNTLYLQMNSLKPEDTAVYYCVAREDVGEPYGYWGQGTQVTVSSTTTPAPRPPTPAPTIASQPLSLRPEACRPAAGGAVHTRGLDFACDIYIWAPLAGTCGVLLLSLVITLYCRRDQRLPPDAHKPPGGGSFRTPIQEEQADAHSTLAKIRVKFSRSADAPAYQQGQNQLYNELNLGRREEYDVLDKRRGRDPEMGGKPRRKNPQEGLYNELQKDKMAEAYSEIGMKGERRRGKGHDGLYQGLSTATKDTYDALHMQALPPRGSGEGRGSLLTCGDVEENPGPMALPVTALLLPLALLLHAARPNWVNVISDLKKIEDLIQSMHIDATLYTESDVHPSCKVTAMKCFLLELQVISLESGDASIHDTVENLIILANNSLSSNGNVTESGCKECEELEEKNIKEFLQSFVHIVQMFINTSTTTPAPRPPTPAPTIASQPLSLRPEACRPAAGGAVHTRGLDFACDIYIWAPLAGTCGVLLLSLVITLYC

SEQ ID NO: 3485 - DNA, 1755 bp, synthetic construct
  misc_feature 1..1755: note = Synthetic
  source 1..1755: mol_type = other DNA
atggccttaccagtgaccgccttgctcctgccgctggccttgctgctccacgccgccaggccggaggtgcagctgttggagtctgggggaggcttggtacagcctggggggtccctgagactctcctgtgcagcctctggaaggggctttacaagctattacatgggatggttccgccaggctccagggaaggaacgggagttcgtctcagctgtgattttcccggagggttaccgctactacgcagactccgtgaagggccggttcaccatctccagagacaattccaagaacacgctgtatctgcaaatgaacagcctgaagcccgaggacacggccgtatattactgtgcgaaatacacaggtttcggtgaggacgcctatcgctactggggccaagggacccaggtcaccgtctcctcaaccacgacgccagcgccgcggccaccaacaccggcgcccaccatcgcgtcgcagcccctgtccctgcgcccagaggcgtgccggccagcggcggggggcgcagtgcacacgagggggctggacttcgcctgtgatatctacatctgggcgcccttggccgggacttgtggggtccttctcctgtcactggttatcaccctttactgccggagggaccagaggctgccccccgatgcccacaagccccctgggggaggcagtttccggacccccatccaagaggagcaggccgacgcccactccaccctggccaagatcagagtgaagttcagcaggagcgcagacgcccccgcgtaccagcagggccagaaccagctctataacgagctcaatctaggacgaagagaggagtacgatgttttggacaagagacgtggccgggaccctgagatggggggaaagccgagaaggaagaaccctcaggaaggcctgtacaatgaactgcagaaagataagatggcggaggcctacagtgagattgggatgaaaggcgagcgccggaggggcaaggggcacgatggcctttaccagggtctcagtacagccaccaaggacacctacgacgcccttcacatgcaggccctgccccctcgcggctctggcgagggaaggggttccctgcttacttgcggcgacgtcgaagagaatcccggtccgatggccctcccagtaactgccctccttttgcccctcgcactccttcttcatgccgctcgccccaactgggtcaacgtgattagcgatttgaagaaaatcgaggaccttatacagtctatgcatattgacgctacactgtatactgagagtgatgtacacccgtcctgtaaggtaacggccatgaaatgctttcttctggagctccaggtcatcagcttggagtctggggacgcaagcatccacgatacggttgaaaacctcatcatccttgcgaacaactctctctcatctaatggaaacgttacagagagtgggtgtaaggagtgcgaagagttggaagaaaaaaacatcaaagaatttcttcaatccttcgttcacatagtgcaaatgttcattaacacgtccactaccacacccgccccgaggccacctacgccggcaccgactatcgccagtcaacccctctctctgcgccccgaggcttgccggcctgcggctggtggggcggtccacacccggggcctggattttgcgtgcgatatatacatctgggcacctcttgccggcacctgcggagtgctgcttctctcactcgttattacgctgtactgctaa

SEQ ID NO: 3486 - DNA, 1752 bp, synthetic construct
  misc_feature 1..1752: note = Synthetic
  source 1..1752: mol_type = other DNA
atggccttaccagtgaccgccttgctcctgccgctggccttgctgctccacgccgccaggccggaggtgcagctgttggagtctgggggaggcttggtacagcctggggggtccctgagactctcctgtgcagcctctggactcacctttagcatacatactgtgggatggttccgccaggctccagggaaggaaagagagttcgtctcagctgcactgggtagtgggggtcgaccttactaccgcgactccgtgaagggccggttcaccatctccagagacaattccaagaacacgctgtatctgcaaatgaacagcctgaaaccagaggacacggccgtatattactgttatgttgacgtggggacagggctgtactatggctactggggccaagggacccaggtcaccgtctcctcaaccacgacgccagcgccgcggccaccaacaccggcgcccaccatcgcgtcgcagcccctgtccctgcgcccagaggcgtgccggccagcggcggggggcgcagtgcacacgagggggctggacttcgcctgtgatatctacatctgggcgcccttggccgggacttgtggggtccttctcctgtcactggttatcaccctttactgccggagggaccagaggctgccccccgatgcccacaagccccctgggggaggcagtttccggacccccatccaagaggagcaggccgacgcccactccaccctggccaagatcagagtgaagttcagcaggagcgcagacgcccccgcgtaccagcagggccagaaccagctctataacgagctcaatctaggacgaagagaggagtacgatgttttggacaagagacgtggccgggaccctgagatggggggaaagccgagaaggaagaaccctcaggaaggcctgtacaatgaactgcagaaagataagatggcggaggcctacagtgagattgggatgaaaggcgagcgccggaggggcaaggggcacgatggcctttaccagggtctcagtacagccaccaaggacacctacgacgcccttcacatgcaggccctgccccctcgcggctctggcgagggaaggggttccctgcttacttgcggcgacgtcgaagagaatcccggtccgatggccctcccagtaactgccctccttttgcccctcgcactccttcttcatgccgctcgccccaactgggtcaacgtgattagcgatttgaagaaaatcgaggaccttatacagtctatgcatattgacgctacactgtatactgagagtgatgtacacccgtcctgtaaggtaacggccatgaaatgctttcttctggagctccaggtcatcagcttggagtctggggacgcaagcatccacgatacggttgaaaacctcatcatccttgcgaacaactctctctcatctaatggaaacgttacagagagtgggtgtaaggagtgcgaagagttggaagaaaaaaacatcaaagaatttcttcaatccttcgttcacatagtgcaaatgttcattaacacgtccactaccacacccgccccgaggccacctacgccggcaccgactatcgccagtcaacccctctctctgcgccccgaggcttgccggcctgcggctggtggggcggtccacacccggggcctggattttgcgtgcgatatatacatctgggcacctcttgccggcacctgcggagtgctgcttctctcactcgttattacgctgtactgctaa

SEQ ID NO: 3487 - DNA, 1761 bp, synthetic construct
  misc_feature 1..1761: note = Synthetic
  source 1..1761: mol_type = other DNA
atggccttaccagtgaccgccttgctcctgccgctggccttgctgctccacgccgccaggccggaggtgcagctgttggagtctgggggaggcttggtacagcctggggggtccctgagactctcctgtgcagcctctggaaggatctttagcagctattttatggggtggtttcgccaggctccagggaaggaacgggagtttgtctcagcccatattagtagcgaaggtagcacatactacagagactccgtgaagggccggttcaccatctccagagacaattccaagaacacgctgtatctgcaaatgaacagcctgaaaccagaggacacggccgtatattactgtgcggcccgcgagtacgcggatacacagcgcggcgagtacgcttactggggccaagggacccaagtcaccgtctcctcaaccacgacgccagcgccgcggccaccaacaccggcgcccaccatcgcgtcgcagcccctgtccctgcgcccagaggcgtgccggccagcggcggggggcgcagtgcacacgagggggctggacttcgcctgtgatatctacatctgggcgcccttggccgggacttgtggggtccttctcctgtcactggttatcaccctttactgccggagggaccagaggctgccccccgatgcccacaagccccctgggggaggcagtttccggacccccatccaagaggagcaggccgacgcccactccaccctggccaagatcagagtgaagttcagcaggagcgcagacgcccccgcgtaccagcagggccagaaccagctctataacgagctcaatctaggacgaagagaggagtacgatgttttggacaagagacgtggccgggaccctgagatggggggaaagccgagaaggaagaaccctcaggaaggcctgtacaatgaactgcagaaagataagatggcggaggcctacagtgagattgggatgaaaggcgagcgccggaggggcaaggggcacgatggcctttaccagggtctcagtacagccaccaaggacacctacgacgcccttcacatgcaggccctgccccctcgcggctctggcgagggaaggggttccctgcttacttgcggcgacgtcgaagagaatcccggtccgatggccctcccagtaactgccctccttttgcccctcgcactccttcttcatgccgctcgccccaactgggtcaacgtgattagcgatttgaagaaaatcgaggaccttatacagtctatgcatattgacgctacactgtatactgagagtgatgtacacccgtcctgtaaggtaacggccatgaaatgctttcttctggagctccaggtcatcagcttggagtctggggacgcaagcatccacgatacggttgaaaacctcatcatccttgcgaacaactctctctcatctaatggaaacgttacagagagtgggtgtaaggagtgcgaagagttggaagaaaaaaacatcaaagaatttcttcaatccttcgttcacatagtgcaaatgttcattaacacgtccactaccacacccgccccgaggccacctacgccggcaccgactatcgccagtcaacccctctctctgcgccccgaggcttgccggcctgcggctggtggggcggtccacacccggggcctggattttgcgtgcgatatatacatctgggcacctcttgccggcacctgcggagtgctgcttctctcactcgttattacgctgtactgctaa

SEQ ID NO: 3488 - DNA, 1746 bp, synthetic construct
  misc_feature 1..1746: note = Synthetic
  source 1..1746: mol_type = other DNA
atggccttaccagtgaccgccttgctcctgccgctggccttgctgctccacgccgccaggccggaggtgcagctgttggagtctgggggaggcttggtacagcctggggggtccctgagactctcctgtgcagcctctggatctatagtcagcagctatgccatgggctggttccgccaggctccagggaaggaaagagagttcgtctcatccgctattggaaagggtggtgtaacaatttatgcagactccgtgaagggccggttcaccatctccagagataattccaagaacacgctgtatctgcaaatgaacagcctgaagccagaggacacggccgtatattactgtgcgacagatgagtctacttaccgtgactactggggccaagggacccaggtcaccgtctcctcaaccacgacgccagcgccgcggccaccaacaccggcgcccaccatcgcgtcgcagcccctgtccctgcgcccagaggcgtgccggccagcggcggggggcgcagtgcacacgagggggctggacttcgcctgtgatatctacatctgggcgcccttggccgggacttgtggggtccttctcctgtcactggttatcaccctttactgccggagggaccagaggctgccccccgatgcccacaagccccctgggggaggcagtttccggacccccatccaagaggagcaggccgacgcccactccaccctggccaagatcagagtgaagttcagcaggagcgcagacgcccccgcgtaccagcagggccagaaccagctctataacgagctcaatctaggacgaagagaggagtacgatgttttggacaagagacgtggccgggaccctgagatggggggaaagccgagaaggaagaaccctcaggaaggcctgtacaatgaactgcagaaagataagatggcggaggcctacagtgagattgggatgaaaggcgagcgccggaggggcaaggggcacgatggcctttaccagggtctcagtacagccaccaaggacacctacgacgcccttcacatgcaggccctgccccctcgcggctctggcgagggaaggggttccctgcttacttgcggcgacgtcgaagagaatcccggtccgatggccctcccagtaactgccctccttttgcccctcgcactccttcttcatgccgctcgccccaactgggtcaacgtgattagcgatttgaagaaaatcgaggaccttatacagtctatgcatattgacgctacactgtatactgagagtgatgtacacccgtcctgtaaggtaacggccatgaaatgctttcttctggagctccaggtcatcagcttggagtctggggacgcaagcatccacgatacggttgaaaacctcatcatccttgcgaacaactctctctcatctaatggaaacgttacagagagtgggtgtaaggagtgcgaagagttggaagaaaaaaacatcaaagaatttcttcaatccttcgttcacatagtgcaaatgttcattaacacgtccactaccacacccgccccgaggccacctacgccggcaccgactatcgccagtcaacccctctctctgcgccccgaggcttgccggcctgcggctggtggggcggtccacacccggggcctggattttgcgtgcgatatatacatctgggcacctcttgccggcacctgcggagtgctgcttctctcactcgttattacgctgtactgctaa

SEQ ID NO: 3489 - DNA, 1743 bp, synthetic construct
  misc_feature 1..1743: note = Synthetic
  source 1..1743: mol_type = other DNA
atggccttaccagtgaccgccttgctcctgccgctggccttgctgctccacgccgccaggccggaggtgcagctgttggagtctgggggaggcttggtacagcctggggggtccctgagactctcctgtgcagcctctggatcactatttcaggtggagcacatcgggtggtttcgccaggctccagggaaggaaagagatttcgtctcagctcaagtcaccggtggcggttatacatactacgcagactccgtgaagggccggttcaccatctccagagacaattccaagaacacgctgtatctgcaaatgaacagcctgaaaccggaggacacggccgtatattactgttacgtacggctcgtggaagaagcatactggggccaagggacccaagtcaccgtctcctcaaccacgacgccagcgccgcggccaccaacaccggcgcccaccatcgcgtcgcagcccctgtccctgcgcccagaggcgtgccggccagcggcggggggcgcagtgcacacgagggggctggacttcgcctgtgatatctacatctgggcgcccttggccgggacttgtggggtccttctcctgtcactggttatcaccctttactgccggagggaccagaggctgccccccgatgcccacaagccccctgggggaggcagtttccggacccccatccaagaggagcaggccgacgcccactccaccctggccaagatcagagtgaagttcagcaggagcgcagacgcccccgcgtaccagcagggccagaaccagctctataacgagctcaatctaggacgaagagaggagtacgatgttttggacaagagacgtggccgggaccctgagatggggggaaagccgagaaggaagaaccctcaggaaggcctgtacaatgaactgcagaaagataagatggcggaggcctacagtgagattgggatgaaaggcgagcgccggaggggcaaggggcacgatggcctttaccagggtctcagtacagccaccaaggacacctacgacgcccttcacatgcaggccctgccccctcgcggctctggcgagggaaggggttccctgcttacttgcggcgacgtcgaagagaatcccggtccgatggccctcccagtaactgccctccttttgcccctcgcactccttcttcatgccgctcgccccaactgggtcaacgtgattagcgatttgaagaaaatcgaggaccttatacagtctatgcatattgacgctacactgtatactgagagtgatgtacacccgtcctgtaaggtaacggccatgaaatgctttcttctggagctccaggtcatcagcttggagtctggggacgcaagcatccacgatacggttgaaaacctcatcatccttgcgaacaactctctctcatctaatggaaacgttacagagagtgggtgtaaggagtgcgaagagttggaagaaaaaaacatcaaagaatttcttcaatccttcgttcacatagtgcaaatgttcattaacacgtccactaccacacccgccccgaggccacctacgccggcaccgactatcgccagtcaacccctctctctgcgccccgaggcttgccggcctgcggctggtggggcggtccacacccggggcctggattttgcgtgcgatatatacatctgggcacctcttgccggcacctgcggagtgctgcttctctcactcgttattacgctgtactgctaa

SEQ ID NO: 3490 - DNA, 1761 bp, synthetic construct
  misc_feature 1..1761: note = Synthetic
  source 1..1761: mol_type = other DNA
atggccttaccagtgaccgccttgctcctgccgctggccttgctgctccacgccgccaggccggaggtgcagctgttggagtctgggggaggcttggtacagcctggggggtccctgagactctcctgtgcagcctctggaacaacctttgccagctctttcatgggatggttccgccaggctccagggaaggagcgcgagtttgtctcagctattgtttttccggggggtagcacatactacgcagactccgtgaagggccggttcaccatctccagagacaattccaagaacacgctgtatctgcaaatgaacagcctgaagcctgaggacacggccgtatattactgtgcggctagaagatatgagttggtggacaggctggagtacgcctactggggccaagggacccaggtcaccgtctcctcaaccacgacgccagcgccgcggccaccaacaccggcgcccaccatcgcgtcgcagcccctgtccctgcgcccagaggcgtgccggccagcggcggggggcgcagtgcacacgagggggctggacttcgcctgtgatatctacatctgggcgcccttggccgggacttgtggggtccttctcctgtcactggttatcaccctttactgccggagggaccagaggctgccccccgatgcccacaagccccctgggggaggcagtttccggacccccatccaagaggagcaggccgacgcccactccaccctggccaagatcagagtgaagttcagcaggagcgcagacgcccccgcgtaccagcagggccagaaccagctctataacgagctcaatctaggacgaagagaggagtacgatgttttggacaagagacgtggccgggaccctgagatggggggaaagccgagaaggaagaaccctcaggaaggcctgtacaatgaactgcagaaagataagatggcggaggcctacagtgagattgggatgaaaggcgagcgccggaggggcaaggggcacgatggcctttaccagggtctcagtacagccaccaaggacacctacgacgcccttcacatgcaggccctgccccctcgcggctctggcgagggaaggggttccctgcttacttgcggcgacgtcgaagagaatcccggtccgatggccctcccagtaactgccctccttttgcccctcgcactccttcttcatgccgctcgccccaactgggtcaacgtgattagcgatttgaagaaaatcgaggaccttatacagtctatgcatattgacgctacactgtatactgagagtgatgtacacccgtcctgtaaggtaacggccatgaaatgctttcttctggagctccaggtcatcagcttggagtctggggacgcaagcatccacgatacggttgaaaacctcatcatccttgcgaacaactctctctcatctaatggaaacgttacagagagtgggtgtaaggagtgcgaagagttggaagaaaaaaacatcaaagaatttcttcaatccttcgttcacatagtgcaaatgttcattaacacgtccactaccacacccgccccgaggccacctacgccggcaccgactatcgccagtcaacccctctctctgcgccccgaggcttgccggcctgcggctggtggggcggtccacacccggggcctggattttgcgtgcgatatatacatctgggcacctcttgccggcacctgcggagtgctgcttctctcactcgttattacgctgtactgctaa

SEQ ID NO: 3491 - DNA, 1746 bp, synthetic construct
  misc_feature 1..1746: note = Synthetic
  source 1..1746: mol_type = other DNA
atggccttaccagtgaccgccttgctcctgccgctggccttgctgctccacgccgccaggccggaggtgcagctgttggagtctgggggaggcttggtacagcctggggggtccctgagactctcctgtgcagcctctggaagcgtgtttagcagctttactattgggtggtttcgccaggctccagggaaggagcgcgagtttgtctcagctattgtcactagcaccggtagtacatactatgcagactccgtgaagggccggttcaccatctccagagacaattccaagaacacgctgtatctgcaaatgaacagcctgaaaccggaggacacggccgtatattactgtaatgtgaggacacaggaggactattactactggggccaagggacccaggtcaccgtctcctcaaccacgacgccagcgccgcggccaccaacaccggcgcccaccatcgcgtcgcagcccctgtccctgcgcccagaggcgtgccggccagcggcggggggcgcagtgcacacgagggggctggacttcgcctgtgatatctacatctgggcgcccttggccgggacttgtggggtccttctcctgtcactggttatcaccctttactgccggagggaccagaggctgccccccgatgcccacaagccccctgggggaggcagtttccggacccccatccaagaggagcaggccgacgcccactccaccctggccaagatcagagtgaagttcagcaggagcgcagacgcccccgcgtaccagcagggccagaaccagctctataacgagctcaatctaggacgaagagaggagtacgatgttttggacaagagacgtggccgggaccctgagatggggggaaagccgagaaggaagaaccctcaggaaggcctgtacaatgaactgcagaaagataagatggcggaggcctacagtgagattgggatgaaaggcgagcgccggaggggcaaggggcacgatggcctttaccagggtctcagtacagccaccaaggacacctacgacgcccttcacatgcaggccctgccccctcgcggctctggcgagggaaggggttccctgcttacttgcggcgacgtcgaagagaatcccggtccgatggccctcccagtaactgccctccttttgcccctcgcactccttcttcatgccgctcgccccaactgggtcaacgtgattagcgatttgaagaaaatcgaggaccttatacagtctatgcatattgacgctacactgtatactgagagtgatgtacacccgtcctgtaaggtaacggccatgaaatgctttcttctggagctccaggtcatcagcttggagtctggggacgcaagcatccacgatacggttgaaaacctcatcatccttgcgaacaactctctctcatctaatggaaacgttacagagagtgggtgtaaggagtgcgaagagttggaagaaaaaaacatcaaagaatttcttcaatccttcgttcacatagtgcaaatgttcattaacacgtccactaccacacccgccccgaggccacctacgccggcaccgactatcgccagtcaacccctctctctgcgccccgaggcttgccggcctgcggctggtggggcggtccacacccggggcctggattttgcgtgcgatatatacatctgggcacctcttgccggcacctgcggagtgctgcttctctcactcgttattacgctgtactgctaa

SEQ ID NO: 3492 - DNA, 1761 bp, synthetic construct
  misc_feature 1..1761: note = Synthetic
  source 1..1761: mol_type = other DNA
atggccttaccagtgaccgccttgctcctgccgctggccttgctgctccacgccgccaggccggaggtgcagctgttggagtctgggggaggcttggtacagcctggggggtccctgagactctcctgtgcagcctctggaagcatttttggcagccacttcatgggctggtttcgccaggctccagggaaggagcgggagttcgtctcagctgcggttaccagcggaggtagtacatactatgcagactccgtgaagggccggttcaccatctccagagacaattccaagaacacgctgtatctgcaaatgaacagcctgaaacctgaggacacggccgtatattactgtgcggctcgaacctaccagtcaacgtatcagcctgaatatgcctactggggccaagggacccaggtcaccgtctcctcaaccacgacgccagcgccgcggccaccaacaccggcgcccaccatcgcgtcgcagcccctgtccctgcgcccagaggcgtgccggccagcggcggggggcgcagtgcacacgagggggctggacttcgcctgtgatatctacatctgggcgcccttggccgggacttgtggggtccttctcctgtcactggttatcaccctttactgccggagggaccagaggctgccccccgatgcccacaagccccctgggggaggcagtttccggacccccatccaagaggagcaggccgacgcccactccaccctggccaagatcagagtgaagttcagcaggagcgcagacgcccccgcgtaccagcagggccagaaccagctctataacgagctcaatctaggacgaagagaggagtacgatgttttggacaagagacgtggccgggaccctgagatggggggaaagccgagaaggaagaaccctcaggaaggcctgtacaatgaactgcagaaagataagatggcggaggcctacagtgagattgggatgaaaggcgagcgccggaggggcaaggggcacgatggcctttaccagggtctcagtacagccaccaaggacacctacgacgcccttcacatgcaggccctgccccctcgcggctctggcgagggaaggggttccctgcttacttgcggcgacgtcgaagagaatcccggtccgatggccctcccagtaactgccctccttttgcccctcgcactccttcttcatgccgctcgccccaactgggtcaacgtgattagcgatttgaagaaaatcgaggaccttatacagtctatgcatattgacgctacactgtatactgagagtgatgtacacccgtcctgtaaggtaacggccatgaaatgctttcttctggagctccaggtcatcagcttggagtctggggacgcaagcatccacgatacggttgaaaacctcatcatccttgcgaacaactctctctcatctaatggaaacgttacagagagtgggtgtaaggagtgcgaagagttggaagaaaaaaacatcaaagaatttcttcaatccttcgttcacatagtgcaaatgttcattaacacgtccactaccacacccgccccgaggccacctacgccggcaccgactatcgccagtcaacccctctctctgcgccccgaggcttgccggcctgcggctggtggggcggtccacacccggggcctggattttgcgtgcgatatatacatctgggcacctcttgccggcacctgcggagtgctgcttctctcactcgttattacgctgtactgctaa

SEQ ID NO: 3493 - DNA, 1767 bp, synthetic construct
  misc_feature 1..1767: note = Synthetic
  source 1..1767: mol_type = other DNA
atggccttaccagtgaccgccttgctcctgccgctggccttgctgctccacgccgccaggccggaggtgcagctgttggagtctgggggaggcttggtacagcctggggggtccctgagactctcctgtgcagcctctggatctatctttagcatcctggacatcgggtggttccgccaggctccagggaaggaacgagagttcgtctcagcctatattagcagcggtggtagtacatactattccgactccgtgaagggccggttcaccatctccagagataattccaagaacacgctgtatctgcaaatgaacagcctgaagccagaggacacggccgtatattactgtgtggctaccatctttggtgatcgtaccgagggccaggaaaggtacgctttctggggccaagggacccaagtcaccgtctcctcaaccacgacgccagcgccgcggccaccaacaccggcgcccaccatcgcgtcgcagcccctgtccctgcgcccagaggcgtgccggccagcggcggggggcgcagtgcacacgagggggctggacttcgcctgtgatatctacatctgggcgcccttggccgggacttgtggggtccttctcctgtcactggttatcaccctttactgccggagggaccagaggctgccccccgatgcccacaagccccctgggggaggcagtttccggacccccatccaagaggagcaggccgacgcccactccaccctggccaagatcagagtgaagttcagcaggagcgcagacgcccccgcgtaccagcagggccagaaccagctctataacgagctcaatctaggacgaagagaggagtacgatgttttggacaagagacgtggccgggaccctgagatggggggaaagccgagaaggaagaaccctcaggaaggcctgtacaatgaactgcagaaagataagatggcggaggcctacagtgagattgggatgaaaggcgagcgccggaggggcaaggggcacgatggcctttaccagggtctcagtacagccaccaaggacacctacgacgcccttcacatgcaggccctgccccctcgcggctctggcgagggaaggggttccctgcttacttgcggcgacgtcgaagagaatcccggtccgatggccctcccagtaactgccctccttttgcccctcgcactccttcttcatgccgctcgccccaactgggtcaacgtgattagcgatttgaagaaaatcgaggaccttatacagtctatgcatattgacgctacactgtatactgagagtgatgtacacccgtcctgtaaggtaacggccatgaaatgctttcttctggagctccaggtcatcagcttggagtctggggacgcaagcatccacgatacggttgaaaacctcatcatccttgcgaacaactctctctcatctaatggaaacgttacagagagtgggtgtaaggagtgcgaagagttggaagaaaaaaacatcaaagaatttcttcaatccttcgttcacatagtgcaaatgttcattaacacgtccactaccacacccgccccgaggccacctacgccggcaccgactatcgccagtcaacccctctctctgcgccccgaggcttgccggcctgcggctggtggggcggtccacacccggggcctggattttgcgtgcgatatatacatctgggcacctcttgccggcacctgcggagtgctgcttctctcactcgttattacgctgtactgctaa

SEQ ID NO: 3494 - DNA, 1761 bp, synthetic construct
  misc_feature 1..1761: note = Synthetic
  source 1..1761: mol_type = other DNA
atggccttaccagtgaccgccttgctcctgccgctggccttgctgctccacgccgccaggccggaggtgcagctgttggagtctgggggaggcttggtacagcctggggggtccctgagactctcctgtgcagcctctggaagcaccacgagcagctattttatgggatggttccgccaggctccagggaaggaacgcgagtttgtctcagctattataactagcagtggtagtccctactatgcagactccgtgaagggccggttcaccatctccagagacaattccaagaacacgctgtatctgcaaatgaacagcctgaaacccgaggacacggccgtatattactgtgcggcgcgtcggtatgggtcgagggaaacggacgactatgggtactggggccaagggacccaggtcaccgtctcctcaaccacgacgccagcgccgcggccaccaacaccggcgcccaccatcgcgtcgcagcccctgtccctgcgcccagaggcgtgccggccagcggcggggggcgcagtgcacacgagggggctggacttcgcctgtgatatctacatctgggcgcccttggccgggacttgtggggtccttctcctgtcactggttatcaccctttactgccggagggaccagaggctgccccccgatgcccacaagccccctgggggaggcagtttccggacccccatccaagaggagcaggccgacgcccactccaccctggccaagatcagagtgaagttcagcaggagcgcagacgcccccgcgtaccagcagggccagaaccagctctataacgagctcaatctaggacgaagagaggagtacgatgttttggacaagagacgtggccgggaccctgagatggggggaaagccgagaaggaagaaccctcaggaaggcctgtacaatgaactgcagaaagataagatggcggaggcctacagtgagattgggatgaaaggcgagcgccggaggggcaaggggcacgatggcctttaccagggtctcagtacagccaccaaggacacctacgacgcccttcacatgcaggccctgccccctcgcggctctggcgagggaaggggttccctgcttacttgcggcgacgtcgaagagaatcccggtccgatggccctcccagtaactgccctccttttgcccctcgcactccttcttcatgccgctcgccccaactgggtcaacgtgattagcgatttgaagaaaatcgaggaccttatacagtctatgcatattgacgctacactgtatactgagagtgatgtacacccgtcctgtaaggtaacggccatgaaatgctttcttctggagctccaggtcatcagcttggagtctggggacgcaagcatccacgatacggttgaaaacctcatcatccttgcgaacaactctctctcatctaatggaaacgttacagagagtgggtgtaaggagtgcgaagagttggaagaaaaaaacatcaaagaatttcttcaatccttcgttcacatagtgcaaatgttcattaacacgtccactaccacacccgccccgaggccacctacgccggcaccgactatcgccagtcaacccctctctctgcgccccgaggcttgccggcctgcggctggtggggcggtccacacccggggcctggattttgcgtgcgatatatacatctgggcacctcttgccggcacctgcggagtgctgcttctctcactcgttattacgctgtactgctaa

SEQ ID NO: 3495 - DNA, 1764 bp, synthetic construct
  misc_feature 1..1764: note = Synthetic
  source 1..1764: mol_type = other DNA
atggccttaccagtgaccgccttgctcctgccgctggccttgctgctccacgccgccaggccggaggtgcagctgttggagtctgggggaggcttggtacagcctggggggtccctgagactctcctgtgcagcctctggatctgtctttagcagctatagcatgtggtttcgccaggctccagggaaggaacgcgagtttgtctcagctattatcactagtggcggtagcacatactacgcagactccgtgaagggccggttcaccatctccagagacaattccaagaacacgctgtatctgcaaatgaacagcctgaaacccgaggacacggccgtatattactgtgtggccgtttacggcataggaactggacaatacatcggtacatatgacatctggggccaagggacccaggtcaccgtctcctcaaccacgacgccagcgccgcggccaccaacaccggcgcccaccatcgcgtcgcagcccctgtccctgcgcccagaggcgtgccggccagcggcggggggcgcagtgcacacgagggggctggacttcgcctgtgatatctacatctgggcgcccttggccgggacttgtggggtccttctcctgtcactggttatcaccctttactgccggagggaccagaggctgccccccgatgcccacaagccccctgggggaggcagtttccggacccccatccaagaggagcaggccgacgcccactccaccctggccaagatcagagtgaagttcagcaggagcgcagacgcccccgcgtaccagcagggccagaaccagctctataacgagctcaatctaggacgaagagaggagtacgatgttttggacaagagacgtggccgggaccctgagatggggggaaagccgagaaggaagaaccctcaggaaggcctgtacaatgaactgcagaaagataagatggcggaggcctacagtgagattgggatgaaaggcgagcgccggaggggcaaggggcacgatggcctttaccagggtctcagtacagccaccaaggacacctacgacgcccttcacatgcaggccctgccccctcgcggctctggcgagggaaggggttccctgcttacttgcggcgacgtcgaagagaatcccggtccgatggccctcccagtaactgccctccttttgcccctcgcactccttcttcatgccgctcgccccaactgggtcaacgtgattagcgatttgaagaaaatcgaggaccttatacagtctatgcatattgacgctacactgtatactgagagtgatgtacacccgtcctgtaaggtaacggccatgaaatgctttcttctggagctccaggtcatcagcttggagtctggggacgcaagcatccacgatacggttgaaaacctcatcatccttgcgaacaactctctctcatctaatggaaacgttacagagagtgggtgtaaggagtgcgaagagttggaagaaaaaaacatcaaagaatttcttcaatccttcgttcacatagtgcaaatgttcattaacacgtccactaccacacccgccccgaggccacctacgccggcaccgactatcgccagtcaacccctctctctgcgccccgaggcttgccggcctgcggctggtggggcggtccacacccggggcctggattttgcgtgcgatatatacatctgggcacctcttgccggcacctgcggagtgctgcttctctcactcgttattacgctgtactgctaa

SEQ ID NO: 3496 - DNA, 1758 bp, synthetic construct
  misc_feature 1..1758: note = Synthetic
  source 1..1758: mol_type = other DNA
atggccttaccagtgaccgccttgctcctgccgctggccttgctgctccacgccgccaggccggaggtgcagctgttggagtctgggggaggcttggtacagcctggggggtccctgagactctcctgtgcagcctctggatccctactgagcatttatgatatgggctggtttcgccaggctccagggaaggagcgagagttcgtctcagcccgtattggcaaaggtggtagtacatactatgcagactccgtgaagggccggttcaccatctccagagataattccaagaacacgctgtatctgcaaatgaacagcctgaaaccggaggacacggccgtatattactgtgcggttctggttggtgagggtgaatcttacggctatcactactggggccaagggacccaggtcaccgtctcctcaaccacgacgccagcgccgcggccaccaacaccggcgcccaccatcgcgtcgcagcccctgtccctgcgcccagaggcgtgccggccagcggcggggggcgcagtgcacacgagggggctggacttcgcctgtgatatctacatctgggcgcccttggccgggacttgtggggtccttctcctgtcactggttatcaccctttactgccggagggaccagaggctgccccccgatgcccacaagccccctgggggaggcagtttccggacccccatccaagaggagcaggccgacgcccactccaccctggccaagatcagagtgaagttcagcaggagcgcagacgcccccgcgtaccagcagggccagaaccagctctataacgagctcaatctaggacgaagagaggagtacgatgttttggacaagagacgtggccgggaccctgagatggggggaaagccgagaaggaagaaccctcaggaaggcctgtacaatgaactgcagaaagataagatggcggaggcctacagtgagattgggatgaaaggcgagcgccggaggggcaaggggcacgatggcctttaccagggtctcagtacagccaccaaggacacctacgacgcccttcacatgcaggccctgccccctcgcggctctggcgagggaaggggttccctgcttacttgcggcgacgtcgaagagaatcccggtccgatggccctcccagtaactgccctccttttgcccctcgcactccttcttcatgccgctcgccccaactgggtcaacgtgattagcgatttgaagaaaatcgaggaccttatacagtctatgcatattgacgctacactgtatactgagagtgatgtacacccgtcctgtaaggtaacggccatgaaatgctttcttctggagctccaggtcatcagcttggagtctggggacgcaagcatccacgatacggttgaaaacctcatcatccttgcgaacaactctctctcatctaatggaaacgttacagagagtgggtgtaaggagtgcgaagagttggaagaaaaaaacatcaaagaatttcttcaatccttcgttcacatagtgcaaatgttcattaacacgtccactaccacacccgccccgaggccacctacgccggcaccgactatcgccagtcaacccctctctctgcgccccgaggcttgccggcctgcggctggtggggcggtccacacccggggcctggattttgcgtgcgatatatacatctgggcacctcttgccggcacctgcggagtgctgcttctctcactcgttattacgctgtactgctaa

SEQ ID NO: 3497 - DNA, 1764 bp, synthetic construct
  misc_feature 1..1764: note = Synthetic
  source 1..1764: mol_type = other DNA
atggccttaccagtgaccgccttgctcctgccgctggccttgctgctccacgccgccaggccggaggtgcagctgttggagtctgggggaggcttggtacagcctggggggtccctgagactctcctgtgcagcctctggaattggcctgagcatatatttcatgggatggtttcgccaggctccagggaaggagcgcgagtttgtctcagctattattagttctagtggtagcacatactacgcagactccgtgaagggccggttcaccatctccagagacaattccaagaacacgctgtatctgcaaatgaacagcctgaagccagaggacacggccgtatattactgtgcggctcgaaccggctactctgaatacgagcaggaagactatggctactggggccaagggacccaagtcaccgtctcctcaaccacgacgccagcgccgcggccaccaacaccggcgcccaccatcgcgtcgcagcccctgtccctgcgcccagaggcgtgccggccagcggcggggggcgcagtgcacacgagggggctggacttcgcctgtgatatctacatctgggcgcccttggccgggacttgtggggtccttctcctgtcactggttatcaccctttactgccggagggaccagaggctgccccccgatgcccacaagccccctgggggaggcagtttccggacccccatccaagaggagcaggccgacgcccactccaccctggccaagatcagagtgaagttcagcaggagcgcagacgcccccgcgtaccagcagggccagaaccagctctataacgagctcaatctaggacgaagagaggagtacgatgttttggacaagagacgtggccgggaccctgagatggggggaaagccgagaaggaagaaccctcaggaaggcctgtacaatgaactgcagaaagataagatggcggaggcctacagtgagattgggatgaaaggcgagcgccggaggggcaaggggcacgatggcctttaccagggtctcagtacagccaccaaggacacctacgacgcccttcacatgcaggccctgccccctcgcggctctggcgagggaaggggttccctgcttacttgcggcgacgtcgaagagaatcccggtccgatggccctcccagtaactgccctccttttgcccctcgcactccttcttcatgccgctcgccccaactgggtcaacgtgattagcgatttgaagaaaatcgaggaccttatacagtctatgcatattgacgctacactgtatactgagagtgatgtacacccgtcctgtaaggtaacggccatgaaatgctttcttctggagctccaggtcatcagcttggagtctggggacgcaagcatccacgatacggttgaaaacctcatcatccttgcgaacaactctctctcatctaatggaaacgttacagagagtgggtgtaaggagtgcgaagagttggaagaaaaaaacatcaaagaatttcttcaatccttcgttcacatagtgcaaatgttcattaacacgtccactaccacacccgccccgaggccacctacgccggcaccgactatcgccagtcaacccctctctctgcgccccgaggcttgccggcctgcggctggtggggcggtccacacccggggcctggattttgcgtgcgatatatacatctgggcacctcttgccggcacctgcggagtgctgcttctctcactcgttattacgctgtactgctaa

SEQ ID NO: 3498 - DNA, 1761 bp, synthetic construct
  misc_feature 1..1761: note = Synthetic
  source 1..1761: mol_type = other DNA
atggccttaccagtgaccgccttgctcctgccgctggccttgctgctccacgccgccaggccggaggtgcagctgttggagtctgggggaggcttggtacagcctggggggtccctgagactctcctgtgcagcctctggaagcatttttagcagctccttcatcggatggttccgccaggctccagggaaggagcgggagtttgtctcagctgtcattgctagcagtggtagtacatactatgcagactccgtgaagggccggttcaccatctccagagacaattccaagaacacgctgtatctgcaaatgaacagcctgaaaccagaggacacggccgtatattactgtgcgggccggttcgggcaggggggggggaccgtggaatatggctactggggccaagggacccaagtcaccgtctcctcaaccacgacgccagcgccgcggccaccaacaccggcgcccaccatcgcgtcgcagcccctgtccctgcgcccagaggcgtgccggccagcggcggggggcgcagtgcacacgagggggctggacttcgcctgtgatatctacatctgggcgcccttggccgggacttgtggggtccttctcctgtcactggttatcaccctttactgccggagggaccagaggctgccccccgatgcccacaagccccctgggggaggcagtttccggacccccatccaagaggagcaggccgacgcccactccaccctggccaagatcagagtgaagttcagcaggagcgcagacgcccccgcgtaccagcagggccagaaccagctctataacgagctcaatctaggacgaagagaggagtacgatgttttggacaagagacgtggccgggaccctgagatggggggaaagccgagaaggaagaaccctcaggaaggcctgtacaatgaactgcagaaagataagatggcggaggcctacagtgagattgggatgaaaggcgagcgccggaggggcaaggggcacgatggcctttaccagggtctcagtacagccaccaaggacacctacgacgcccttcacatgcaggccctgccccctcgcggctctggcgagggaaggggttccctgcttacttgcggcgacgtcgaagagaatcccggtccgatggccctcccagtaactgccctccttttgcccctcgcactccttcttcatgccgctcgccccaactgggtcaacgtgattagcgatttgaagaaaatcgaggaccttatacagtctatgcatattgacgctacactgtatactgagagtgatgtacacccgtcctgtaaggtaacggccatgaaatgctttcttctggagctccaggtcatcagcttggagtctggggacgcaagcatccacgatacggttgaaaacctcatcatccttgcgaacaactctctctcatctaatggaaacgttacagagagtgggtgtaaggagtgcgaagagttggaagaaaaaaacatcaaagaatttcttcaatccttcgttcacatagtgcaaatgttcattaacacgtccactaccacacccgccccgaggccacctacgccggcaccgactatcgccagtcaacccctctctctgcgccccgaggcttgccggcctgcggctggtggggcggtccacacccggggcctggattttgcgtgcgatatatacatctgggcacctcttgccggcacctgcggagtgctgcttctctcactcgttattacgctgtactgctaa

SEQ ID NO: 3499 - DNA, 1761 bp, synthetic construct
  misc_feature 1..1761: note = Synthetic
  source 1..1761: mol_type = other DNA
atggccttaccagtgaccgccttgctcctgccgctggccttgctgctccacgccgccaggccggaggtgcagctgttggagtctgggggaggcttggtacagcctggggggtccctgagactctcctgtgcagcctctggacgagtgtttagcttctattttatggggtggttccgccaggctccagggaaggaaagggagttcgtcagtggcgttattggcaaaaccggtagtacatactatactgactccgtgaagggccggttcaccatctccagagataattccaagaacacgctgtatctgcaaatgaacagcctgaaacccgaggacacggccgtatattactgtgcggccagtgaataccaaggtaccgggtacggagaatttgcatactggggccaagggacccaggtcaccgtctcctcaaccacgacgccagcgccgcggccaccaacaccggcgcccaccatcgcgtcgcagcccctgtccctgcgcccagaggcgtgccggccagcggcggggggcgcagtgcacacgagggggctggacttcgcctgtgatatctacatctgggcgcccttggccgggacttgtggggtccttctcctgtcactggttatcaccctttactgccggagggaccagaggctgccccccgatgcccacaagccccctgggggaggcagtttccggacccccatccaagaggagcaggccgacgcccactccaccctggccaagatcagagtgaagttcagcaggagcgcagacgcccccgcgtaccagcagggccagaaccagctctataacgagctcaatctaggacgaagagaggagtacgatgttttggacaagagacgtggccgggaccctgagatggggggaaagccgagaaggaagaaccctcaggaaggcctgtacaatgaactgcagaaagataagatggcggaggcctacagtgagattgggatgaaaggcgagcgccggaggggcaaggggcacgatggcctttaccagggtctcagtacagccaccaaggacacctacgacgcccttcacatgcaggccctgccccctcgcggctctggcgagggaaggggttccctgcttacttgcggcgacgtcgaagagaatcccggtccgatggccctcccagtaactgccctccttttgcccctcgcactccttcttcatgccgctcgccccaactgggtcaacgtgattagcgatttgaagaaaatcgaggaccttatacagtctatgcatattgacgctacactgtatactgagagtgatgtacacccgtcctgtaaggtaacggccatgaaatgctttcttctggagctccaggtcatcagcttggagtctggggacgcaagcatccacgatacggttgaaaacctcatcatccttgcgaacaactctctctcatctaatggaaacgttacagagagtgggtgtaaggagtgcgaagagttggaagaaaaaaacatcaaagaatttcttcaatccttcgttcacatagtgcaaatgttcattaacacgtccactaccacacccgccccgaggccacctacgccggcaccgactatcgccagtcaacccctctctctgcgccccgaggcttgccggcctgcggctggtggggcggtccacacccggggcctggattttgcgtgcgatatatacatctgggcacctcttgccggcacctgcggagtgctgcttctctcactcgttattacgctgtactgctaa

SEQ ID NO: 3500 - DNA, 1743 bp, synthetic construct
  misc_feature 1..1743: note = Synthetic
  source 1..1743: mol_type = other DNA
atggccttaccagtgaccgccttgctcctgccgctggccttgctgctccacgccgccaggccggaggtgcagctgttggagtctgggggaggcttggtacagcctggggggtccctgagactctcctgtgcagcctctggaagtttgtttgaagtcgaacacatcggatggttccgccaggctccagggaaggagagggagtttgtctcagctcaagtgaccggtggcggttatacatactacgcagactccgtgaagggccggttcaccatctccagagacaattccaagaacacgctgtatctgcaaatgaacagcctgaaaccggaggacacggccgtatattactgttacgtccggcttgtggaggaagcctactggggccaagggacccaagtcaccgtctcctcaaccacgacgccagcgccgcggccaccaacaccggcgcccaccatcgcgtcgcagcccctgtccctgcgcccagaggcgtgccggccagcggcggggggcgcagtgcacacgagggggctggacttcgcctgtgatatctacatctgggcgcccttggccgggacttgtggggtccttctcctgtcactggttatcaccctttactgccggagggaccagaggctgccccccgatgcccacaagccccctgggggaggcagtttccggacccccatccaagaggagcaggccgacgcccactccaccctggccaagatcagagtgaagttcagcaggagcgcagacgcccccgcgtaccagcagggccagaaccagctctataacgagctcaatctaggacgaagagaggagtacgatgttttggacaagagacgtggccgggaccctgagatggggggaaagccgagaaggaagaaccctcaggaaggcctgtacaatgaactgcagaaagataagatggcggaggcctacagtgagattgggatgaaaggcgagcgccggaggggcaaggggcacgatggcctttaccagggtctcagtacagccaccaaggacacctacgacgcccttcacatgcaggccctgccccctcgcggctctggcgagggaaggggttccctgcttacttgcggcgacgtcgaagagaatcccggtccgatggccctcccagtaactgccctccttttgcccctcgcactccttcttcatgccgctcgccccaactgggtcaacgtgattagcgatttgaagaaaatcgaggaccttatacagtctatgcatattgacgctacactgtatactgagagtgatgtacacccgtcctgtaaggtaacggccatgaaatgctttcttctggagctccaggtcatcagcttggagtctggggacgcaagcatccacgatacggttgaaaacctcatcatccttgcgaacaactctctctcatctaatggaaacgttacagagagtgggtgtaaggagtgcgaagagttggaagaaaaaaacatcaaagaatttcttcaatccttcgttcacatagtgcaaatgttcattaacacgtccactaccacacccgccccgaggccacctacgccggcaccgactatcgccagtcaacccctctctctgcgccccgaggcttgccggcctgcggctggtggggcggtccacacccggggcctggattttgcgtgcgatatatacatctgggcacctcttgccggcacctgcggagtgctgcttctctcactcgttattacgctgtactgctaa

SEQ ID NO: 3501 - DNA, 1767 bp, synthetic construct
  misc_feature 1..1767: note = Synthetic
  source 1..1767: mol_type = other DNA
atggccttaccagtgaccgccttgctcctgccgctggccttgctgctccacgccgccaggccggaggtgcagctgttggagtctgggggaggcttggtacagcctggggggtccctgagactctcctgtgcagcctctggacggatttttggagagtattttatcggatggttccgccaggctccagggaaggagcgggagttcgtctcagctattatcaccggcagtggtattacacactacgcagactccgtgaagggccggttcaccatctccagagacaattccaagaacacgctgtatctgcaaatgaacagcctgaaaccggaggacacggccgtatattactgtgcggcgcgcacagactacactacaggccaggaactaccagaatacgggtactggggccaagggacccaggtcaccgtctcctcaaccacgacgccagcgccgcggccaccaacaccggcgcccaccatcgcgtcgcagcccctgtccctgcgcccagaggcgtgccggccagcggcggggggcgcagtgcacacgagggggctggacttcgcctgtgatatctacatctgggcgcccttggccgggacttgtggggtccttctcctgtcactggttatcaccctttactgccggagggaccagaggctgccccccgatgcccacaagccccctgggggaggcagtttccggacccccatccaagaggagcaggccgacgcccactccaccctggccaagatcagagtgaagttcagcaggagcgcagacgcccccgcgtaccagcagggccagaaccagctctataacgagctcaatctaggacgaagagaggagtacgatgttttggacaagagacgtggccgggaccctgagatggggggaaagccgagaaggaagaaccctcaggaaggcctgtacaatgaactgcagaaagataagatggcggaggcctacagtgagattgggatgaaaggcgagcgccggaggggcaaggggcacgatggcctttaccagggtctcagtacagccaccaaggacacctacgacgcccttcacatgcaggccctgccccctcgcggctctggcgagggaaggggttccctgcttacttgcggcgacgtcgaagagaatcccggtccgatggccctcccagtaactgccctccttttgcccctcgcactccttcttcatgccgctcgccccaactgggtcaacgtgattagcgatttgaagaaaatcgaggaccttatacagtctatgcatattgacgctacactgtatactgagagtgatgtacacccgtcctgtaaggtaacggccatgaaatgctttcttctggagctccaggtcatcagcttggagtctggggacgcaagcatccacgatacggttgaaaacctcatcatccttgcgaacaactctctctcatctaatggaaacgttacagagagtgggtgtaaggagtgcgaagagttggaagaaaaaaacatcaaagaatttcttcaatccttcgttcacatagtgcaaatgttcattaacacgtccactaccacacccgccccgaggccacctacgccggcaccgactatcgccagtcaacccctctctctgcgccccgaggcttgccggcctgcggctggtggggcggtccacacccggggcctggattttgcgtgcgatatatacatctgggcacctcttgccggcacctgcggagtgctgcttctctcactcgttattacgctgtactgctaa

SEQ ID NO: 3502 - DNA, 1752 bp, synthetic construct
  misc_feature 1..1752: note = Synthetic
  source 1..1752: mol_type = other DNA
atggccttaccagtgaccgccttgctcctgccgctggccttgctgctccacgccgccaggccggaggtgcagctgttggagtctgggggaggcttggtacagcctggggggtccctgagactctcctgtgcagcctctggatcaattgagagcatttatttcatcgggtggtttcgccaggctccagggaaggagagagagtttgtctcagctgaattcatcccaggaggtagcacagtgtactcagactccgtgaagggccggttcaccatctccagagacaattccaagaacacgctgtatctgcaaatgaacagcctgaaacccgaggacacggccgtatattactgtaacgccggcctagacgaagggcggtactacacctactggggccaagggacccaggtcaccgtctcctcaaccacgacgccagcgccgcggccaccaacaccggcgcccaccatcgcgtcgcagcccctgtccctgcgcccagaggcgtgccggccagcggcggggggcgcagtgcacacgagggggctggacttcgcctgtgatatctacatctgggcgcccttggccgggacttgtggggtccttctcctgtcactggttatcaccctttactgccggagggaccagaggctgccccccgatgcccacaagccccctgggggaggcagtttccggacccccatccaagaggagcaggccgacgcccactccaccctggccaagatcagagtgaagttcagcaggagcgcagacgcccccgcgtaccagcagggccagaaccagctctataacgagctcaatctaggacgaagagaggagtacgatgttttggacaagagacgtggccgggaccctgagatggggggaaagccgagaaggaagaaccctcaggaaggcctgtacaatgaactgcagaaagataagatggcggaggcctacagtgagattgggatgaaaggcgagcgccggaggggcaaggggcacgatggcctttaccagggtctcagtacagccaccaaggacacctacgacgcccttcacatgcaggccctgccccctcgcggctctggcgagggaaggggttccctgcttacttgcggcgacgtcgaagagaatcccggtccgatggccctcccagtaactgccctccttttgcccctcgcactccttcttcatgccgctcgccccaactgggtcaacgtgattagcgatttgaagaaaatcgaggaccttatacagtctatgcatattgacgctacactgtatactgagagtgatgtacacccgtcctgtaaggtaacggccatgaaatgctttcttctggagctccaggtcatcagcttggagtctggggacgcaagcatccacgatacggttgaaaacctcatcatccttgcgaacaactctctctcatctaatggaaacgttacagagagtgggtgtaaggagtgcgaagagttggaagaaaaaaacatcaaagaatttcttcaatccttcgttcacatagtgcaaatgttcattaacacgtccactaccacacccgccccgaggccacctacgccggcaccgactatcgccagtcaacccctctctctgcgccccgaggcttgccggcctgcggctggtggggcggtccacacccggggcctggattttgcgtgcgatatatacatctgggcacctcttgccggcacctgcggagtgctgcttctctcactcgttattacgctgtactgctaa

SEQ ID NO: 3503 - DNA, 1743 bp, synthetic construct
  misc_feature 1..1743: note = Synthetic
  source 1..1743: mol_type = other DNA
atggccttaccagtgaccgccttgctcctgccgctggccttgctgctccacgccgccaggccggaggtgcagctgttggagtctgggggaggcttggtacagcctggggggtccctgagactctcctgtgcagcctctggaatagaggtcagcagcagtgtagtgggttggtttcgccaggctccagggaaggagcgggagtttgtctcagctagcggtgtgggaggtagcacatactacgcagactccgtgaagggccggttcaccatctccagagacaattccaagaacacgctgtatctgcaaatgaacagcctgaagcctgaggacacggccgtatattactgttatgcagtgtacttgaccatctacacctactggggccaagggacccaggtcaccgtctcctcaaccacgacgccagcgccgcggccaccaacaccggcgcccaccatcgcgtcgcagcccctgtccctgcgcccagaggcgtgccggccagcggcggggggcgcagtgcacacgagggggctggacttcgcctgtgatatctacatctgggcgcccttggccgggacttgtggggtccttctcctgtcactggttatcaccctttactgccggagggaccagaggctgccccccgatgcccacaagccccctgggggaggcagtttccggacccccatccaagaggagcaggccgacgcccactccaccctggccaagatcagagtgaagttcagcaggagcgcagacgcccccgcgtaccagcagggccagaaccagctctataacgagctcaatctaggacgaagagaggagtacgatgttttggacaagagacgtggccgggaccctgagatggggggaaagccgagaaggaagaaccctcaggaaggcctgtacaatgaactgcagaaagataagatggcggaggcctacagtgagattgggatgaaaggcgagcgccggaggggcaaggggcacgatggcctttaccagggtctcagtacagccaccaaggacacctacgacgcccttcacatgcaggccctgccccctcgcggctctggcgagggaaggggttccctgcttacttgcggcgacgtcgaagagaatcccggtccgatggccctcccagtaactgccctccttttgcccctcgcactccttcttcatgccgctcgccccaactgggtcaacgtgattagcgatttgaagaaaatcgaggaccttatacagtctatgcatattgacgctacactgtatactgagagtgatgtacacccgtcctgtaaggtaacggccatgaaatgctttcttctggagctccaggtcatcagcttggagtctggggacgcaagcatccacgatacggttgaaaacctcatcatccttgcgaacaactctctctcatctaatggaaacgttacagagagtgggtgtaaggagtgcgaagagttggaagaaaaaaacatcaaagaatttcttcaatccttcgttcacatagtgcaaatgttcattaacacgtccactaccacacccgccccgaggccacctacgccggcaccgactatcgccagtcaacccctctctctgcgccccgaggcttgccggcctgcggctggtggggcggtccacacccggggcctggattttgcgtgcgatatatacatctgggcacctcttgccggcacctgcggagtgctgcttctctcactcgttattacgctgtactgctaa

SEQ ID NO: 3504 - DNA, 1746 bp, synthetic construct
  misc_feature 1..1746: note = Synthetic
  source 1..1746: mol_type = other DNA
atggccttaccagtgaccgccttgctcctgccgctggccttgctgctccacgccgccaggccggaggtgcagctgttggagtctgggggaggcttggtacagcctggggggtccctgagactctcctgtgcagcctctggattcaccatcagcagatatgccatggcatggtttcgccaggctccagggaaggaacgcgagttcgtcagtgggagcattttcgttggtggtggcacatactatagggactccgtgaagggccggttcaccatctccagagataattccaagaacacgctgtatctgcaaatgaacagcctgaaacctgaggacacggccgtatattactgttatgccaccgtgggtgactcctattattactggggccaagggacccaggtcaccgtctcctcaaccacgacgccagcgccgcggccaccaacaccggcgcccaccatcgcgtcgcagcccctgtccctgcgcccagaggcgtgccggccagcggcggggggcgcagtgcacacgagggggctggacttcgcctgtgatatctacatctgggcgcccttggccgggacttgtggggtccttctcctgtcactggttatcaccctttactgccggagggaccagaggctgccccccgatgcccacaagccccctgggggaggcagtttccggacccccatccaagaggagcaggccgacgcccactccaccctggccaagatcagagtgaagttcagcaggagcgcagacgcccccgcgtaccagcagggccagaaccagctctataacgagctcaatctaggacgaagagaggagtacgatgttttggacaagagacgtggccgggaccctgagatggggggaaagccgagaaggaagaaccctcaggaaggcctgtacaatgaactgcagaaagataagatggcggaggcctacagtgagattgggatgaaaggcgagcgccggaggggcaaggggcacgatggcctttaccagggtctcagtacagccaccaaggacacctacgacgcccttcacatgcaggccctgccccctcgcggctctggcgagggaaggggttccctgcttacttgcggcgacgtcgaagagaatcccggtccgatggccctcccagtaactgccctccttttgcccctcgcactccttcttcatgccgctcgccccaactgggtcaacgtgattagcgatttgaagaaaatcgaggaccttatacagtctatgcatattgacgctacactgtatactgagagtgatgtacacccgtcctgtaaggtaacggccatgaaatgctttcttctggagctccaggtcatcagcttggagtctggggacgcaagcatccacgatacggttgaaaacctcatcatccttgcgaacaactctctctcatctaatggaaacgttacagagagtgggtgtaaggagtgcgaagagttggaagaaaaaaacatcaaagaatttcttcaatccttcgttcacatagtgcaaatgttcattaacacgtccactaccacacccgccccgaggccacctacgccggcaccgactatcgccagtcaacccctctctctgcgccccgaggcttgccggcctgcggctggtggggcggtccacacccggggcctggattttgcgtgcgatatatacatctgggcacctcttgccggcacctgcggagtgctgcttctctcactcgttattacgctgtactgctaa

SEQ ID NO: 3505 - DNA, 1743 bp, synthetic construct
  misc_feature 1..1743: note = Synthetic
  source 1..1743: mol_type = other DNA
atggccttaccagtgaccgccttgctcctgccgctggccttgctgctccacgccgccaggccggaggtgcagctgttggagtctgggggaggcttggtacagcctggggggtccctgagactctcctgtgcagcctctggaagcctgtttagcgttgagcacatcggctggttccgccaggctccagggaaggagagagagtttgtctcagctcaggtaaccggtgggggttatacatactacgcagactccgtgaagggccggttcaccatctccagagacaattccaagaacacgctgtatctgcaaatgaacagcctgaaaccagaggacacggccgtatattactgttatgttagacttgtggaggaagcttactggggccaagggacccaggtcaccgtctcctcaaccacgacgccagcgccgcggccaccaacaccggcgcccaccatcgcgtcgcagcccctgtccctgcgcccagaggcgtgccggccagcggcggggggcgcagtgcacacgagggggctggacttcgcctgtgatatctacatctgggcgcccttggccgggacttgtggggtccttctcctgtcactggttatcaccctttactgccggagggaccagaggctgccccccgatgcccacaagccccctgggggaggcagtttccggacccccatccaagaggagcaggccgacgcccactccaccctggccaagatcagagtgaagttcagcaggagcgcagacgcccccgcgtaccagcagggccagaaccagctctataacgagctcaatctaggacgaagagaggagtacgatgttttggacaagagacgtggccgggaccctgagatggggggaaagccgagaaggaagaaccctcaggaaggcctgtacaatgaactgcagaaagataagatggcggaggcctacagtgagattgggatgaaaggcgagcgccggaggggcaaggggcacgatggcctttaccagggtctcagtacagccaccaaggacacctacgacgcccttcacatgcaggccctgccccctcgcggctctggcgagggaaggggttccctgcttacttgcggcgacgtcgaagagaatcccggtccgatggccctcccagtaactgccctccttttgcccctcgcactccttcttcatgccgctcgccccaactgggtcaacgtgattagcgatttgaagaaaatcgaggaccttatacagtctatgcatattgacgctacactgtatactgagagtgatgtacacccgtcctgtaaggtaacggccatgaaatgctttcttctggagctccaggtcatcagcttggagtctggggacgcaagcatccacgatacggttgaaaacctcatcatccttgcgaacaactctctctcatctaatggaaacgttacagagagtgggtgtaaggagtgcgaagagttggaagaaaaaaacatcaaagaatttcttcaatccttcgttcacatagtgcaaatgttcattaacacgtccactaccacacccgccccgaggccacctacgccggcaccgactatcgccagtcaacccctctctctgcgccccgaggcttgccggcctgcggctggtggggcggtccacacccggggcctggattttgcgtgcgatatatacatctgggcacctcttgccggcacctgcggagtgctgcttctctcactcgttattacgctgtactgctaa

SEQ ID NO: 3506 - DNA, 1746 bp, synthetic construct
  misc_feature 1..1746: note = Synthetic
  source 1..1746: mol_type = other DNA
atggccttaccagtgaccgccttgctcctgccgctggccttgctgctccacgccgccaggccggaggtgcagctgttggagtctgggggaggcttggtacagcctggggggtccctgagactctcctgtgcagcctctggattcatctttagcatttatgatatgggttggttccgccaggctccagggaaggaaagggagttcgtctcagctattagtactaccggtggaagcatttactacgcagactccgtgaagggccggttcaccatctccagagacaattccaagaacacgctgtatctgcaaatgaacagcctgaagccagaggacacggccgtatattactgtaacgccgaccctttagaaagctacgggtactggggccaagggacccaggtcaccgtctcctcaaccacgacgccagcgccgcggccaccaacaccggcgcccaccatcgcgtcgcagcccctgtccctgcgcccagaggcgtgccggccagcggcggggggcgcagtgcacacgagggggctggacttcgcctgtgatatctacatctgggcgcccttggccgggacttgtggggtccttctcctgtcactggttatcaccctttactgccggagggaccagaggctgccccccgatgcccacaagccccctgggggaggcagtttccggacccccatccaagaggagcaggccgacgcccactccaccctggccaagatcagagtgaagttcagcaggagcgcagacgcccccgcgtaccagcagggccagaaccagctctataacgagctcaatctaggacgaagagaggagtacgatgttttggacaagagacgtggccgggaccctgagatggggggaaagccgagaaggaagaaccctcaggaaggcctgtacaatgaactgcagaaagataagatggcggaggcctacagtgagattgggatgaaaggcgagcgccggaggggcaaggggcacgatggcctttaccagggtctcagtacagccaccaaggacacctacgacgcccttcacatgcaggccctgccccctcgcggctctggcgagggaaggggttccctgcttacttgcggcgacgtcgaagagaatcccggtccgatggccctcccagtaactgccctccttttgcccctcgcactccttcttcatgccgctcgccccaactgggtcaacgtgattagcgatttgaagaaaatcgaggaccttatacagtctatgcatattgacgctacactgtatactgagagtgatgtacacccgtcctgtaaggtaacggccatgaaatgctttcttctggagctccaggtcatcagcttggagtctggggacgcaagcatccacgatacggttgaaaacctcatcatccttgcgaacaactctctctcatctaatggaaacgttacagagagtgggtgtaaggagtgcgaagagttggaagaaaaaaacatcaaagaatttcttcaatccttcgttcacatagtgcaaatgttcattaacacgtccactaccacacccgccccgaggccacctacgccggcaccgactatcgccagtcaacccctctctctgcgccccgaggcttgccggcctgcggctggtggggcggtccacacccggggcctggattttgcgtgcgatatatacatctgggcacctcttgccggcacctgcggagtgctgcttctctcactcgttattacgctgtactgctaa

SEQ ID NO: 3507 - DNA, 1752 bp, synthetic construct
  misc_feature 1..1752: note = Synthetic
  source 1..1752: mol_type = other DNA
atggccttaccagtgaccgccttgctcctgccgctggccttgctgctccacgccgccaggccggaggtgcagctgttggagtctgggggaggcttggtacagcctggggggtccctgagactctcctgtgcagcctctggatccgtatttagcagctatttcattggctggttccgccaggctccagggaaggagagagagttcgtctcagcagtgattagtagcagtggtagcacatactacgcagactccgtgaagggccggttcaccatctccagagacaattccaagaacacgctgtatctgcaaatgaacagcctgaagcctgaggacacggccgtatattactgtgttgcacgggaggatgttggcgagccctacggctactggggccaagggacccaggtcaccgtctcctcaaccacgacgccagcgccgcggccaccaacaccggcgcccaccatcgcgtcgcagcccctgtccctgcgcccagaggcgtgccggccagcggcggggggcgcagtgcacacgagggggctggacttcgcctgtgatatctacatctgggcgcccttggccgggacttgtggggtccttctcctgtcactggttatcaccctttactgccggagggaccagaggctgccccccgatgcccacaagccccctgggggaggcagtttccggacccccatccaagaggagcaggccgacgcccactccaccctggccaagatcagagtgaagttcagcaggagcgcagacgcccccgcgtaccagcagggccagaaccagctctataacgagctcaatctaggacgaagagaggagtacgatgttttggacaagagacgtggccgggaccctgagatggggggaaagccgagaaggaagaaccctcaggaaggcctgtacaatgaactgcagaaagataagatggcggaggcctacagtgagattgggatgaaaggcgagcgccggaggggcaaggggcacgatggcctttaccagggtctcagtacagccaccaaggacacctacgacgcccttcacatgcaggccctgccccctcgcggctctggcgagggaaggggttccctgcttacttgcggcgacgtcgaagagaatcccggtccgatggccctcccagtaactgccctccttttgcccctcgcactccttcttcatgccgctcgccccaactgggtcaacgtgattagcgatttgaagaaaatcgaggaccttatacagtctatgcatattgacgctacactgtatactgagagtgatgtacacccgtcctgtaaggtaacggccatgaaatgctttcttctggagctccaggtcatcagcttggagtctggggacgcaagcatccacgatacggttgaaaacctcatcatccttgcgaacaactctctctcatctaatggaaacgttacagagagtgggtgtaaggagtgcgaagagttggaagaaaaaaacatcaaagaatttcttcaatccttcgttcacatagtgcaaatgttcattaacacgtccactaccacacccgccccgaggccacctacgccggcaccgactatcgccagtcaacccctctctctgcgccccgaggcttgccggcctgcggctggtggggcggtccacacccggggcctggattttgcgtgcgatatatacatctgggcacctcttgccggcacctgcggagtgctgcttctctcactcgttattacgctgtactgctaa

SEQ ID NO: 3508 - DNA, 1755 bp, synthetic construct
  misc_feature 1..1755: note = Synthetic
  source 1..1755: mol_type = other DNA
atggccttaccagtgaccgccttgctcctgccgctggccttgctgctccacgccgccaggccggaggtgcagctgctggaaagcggcggcggactggtgcaacctggaggatctctgagactgagctgcgctgcttctggccggggctttaccagctactacatgggctggttcagacaggcccctggcaaggaacgggaattcgtgtccgccgtgatcttcccagagggctaccggtactacgccgacagcgtgaaaggcagattcaccatcagcagagataatagcaagaacaccctgtacctgcagatgaacagcctcaagcccgaggacacagccgtctactattgtgccaagtacacaggcttcggcgaggacgcctacagatactggggccagggcacccaggtgaccgtgtccagcaccacgacgccagcgccgcggccaccaacaccggcgcccaccatcgcgtcgcagcccctgtccctgcgcccagaggcgtgccggccagcggcggggggcgcagtgcacacgagggggctggacttcgcctgtgatatctacatctgggcgcccttggccgggacttgtggggtccttctcctgtcactggttatcaccctttactgccggagggaccagaggctgccccccgatgcccacaagccccctgggggaggcagtttccggacccccatccaagaggagcaggccgacgcccactccaccctggccaagatcagagtgaagttcagcaggagcgcagacgcccccgcgtaccagcagggccagaaccagctctataacgagctcaatctaggacgaagagaggagtacgatgttttggacaagagacgtggccgggaccctgagatggggggaaagccgagaaggaagaaccctcaggaaggcctgtacaatgaactgcagaaagataagatggcggaggcctacagtgagattgggatgaaaggcgagcgccggaggggcaaggggcacgatggcctttaccagggtctcagtacagccaccaaggacacctacgacgcccttcacatgcaggccctgccccctcgcggctctggcgagggaaggggttccctgcttacttgcggcgacgtcgaagagaatcccggtccgatggccctcccagtaactgccctccttttgcccctcgcactccttcttcatgccgctcgccccaactgggtcaacgtgattagcgatttgaagaaaatcgaggaccttatacagtctatgcatattgacgctacactgtatactgagagtgatgtacacccgtcctgtaaggtaacggccatgaaatgctttcttctggagctccaggtcatcagcttggagtctggggacgcaagcatccacgatacggttgaaaacctcatcatccttgcgaacaactctctctcatctaatggaaacgttacagagagtgggtgtaaggagtgcgaagagttggaagaaaaaaacatcaaagaatttcttcaatccttcgttcacatagtgcaaatgttcattaacacgtccactaccacacccgccccgaggccacctacgccggcaccgactatcgccagtcaacccctctctctgcgccccgaggcttgccggcctgcggctggtggggcggtccacacccggggcctggattttgcgtgcgatatatacatctgggcacctcttgccggcacctgcggagtgctgcttctctcactcgttattacgctgtactgctaa

SEQ ID NO: 3509 - DNA, 1752 bp, synthetic construct
  misc_feature 1..1752: note = Synthetic
  source 1..1752: mol_type = other DNA
atggccttaccagtgaccgccttgctcctgccgctggccttgctgctccacgccgccaggccggaggtgcagctgctggaatctggcggaggcctggtgcaacctggaggatctctgagactgagctgtgccgcttctggcctcacattcagcatccacacagttggctggtttagacaggcccctggcaaagagcgggaattcgtgtccgccgccctgggcagcggcggacgcccatactatagagatagcgtgaagggcagattcaccatcagccgggacaatagcaagaacaccctgtacctgcagatgaacagcctgaagcccgaggacaccgccgtgtactactgctacgtggacgtgggcaccggcctgtactacggctactggggccagggcacacaggtgaccgtctccagcaccacgacgccagcgccgcggccaccaacaccggcgcccaccatcgcgtcgcagcccctgtccctgcgcccagaggcgtgccggccagcggcggggggcgcagtgcacacgagggggctggacttcgcctgtgatatctacatctgggcgcccttggccgggacttgtggggtccttctcctgtcactggttatcaccctttactgccggagggaccagaggctgccccccgatgcccacaagccccctgggggaggcagtttccggacccccatccaagaggagcaggccgacgcccactccaccctggccaagatcagagtgaagttcagcaggagcgcagacgcccccgcgtaccagcagggccagaaccagctctataacgagctcaatctaggacgaagagaggagtacgatgttttggacaagagacgtggccgggaccctgagatggggggaaagccgagaaggaagaaccctcaggaaggcctgtacaatgaactgcagaaagataagatggcggaggcctacagtgagattgggatgaaaggcgagcgccggaggggcaaggggcacgatggcctttaccagggtctcagtacagccaccaaggacacctacgacgcccttcacatgcaggccctgccccctcgcggctctggcgagggaaggggttccctgcttacttgcggcgacgtcgaagagaatcccggtccgatggccctcccagtaactgccctccttttgcccctcgcactccttcttcatgccgctcgccccaactgggtcaacgtgattagcgatttgaagaaaatcgaggaccttatacagtctatgcatattgacgctacactgtatactgagagtgatgtacacccgtcctgtaaggtaacggccatgaaatgctttcttctggagctccaggtcatcagcttggagtctggggacgcaagcatccacgatacggttgaaaacctcatcatccttgcgaacaactctctctcatctaatggaaacgttacagagagtgggtgtaaggagtgcgaagagttggaagaaaaaaacatcaaagaatttcttcaatccttcgttcacatagtgcaaatgttcattaacacgtccactaccacacccgccccgaggccacctacgccggcaccgactatcgccagtcaacccctctctctgcgccccgaggcttgccggcctgcggctggtggggcggtccacacccggggcctggattttgcgtgcgatatatacatctgggcacctcttgccggcacctgcggagtgctgcttctctcactcgttattacgctgtactgctaa

SEQ ID NO: 3510 - DNA, 1752 bp, synthetic construct; identical to SEQ ID NO: 3509
  misc_feature 1..1752: note = Synthetic
  source 1..1752: mol_type = other DNA

SEQ ID NO: 3511 - DNA, 1746 bp, synthetic construct
  misc_feature 1..1746: note = Synthetic
  source 1..1746: mol_type = other DNA
atggccttaccagtgaccgccttgctcctgccgctggccttgctgctccacgccgccaggccggaggtgcagctgctggaaagcggaggcggcctggttcaacctggaggatctctgagactgagctgcgccgctagcggctctatcgtgtccagctacgccatgggctggtttagacaggcccctggcaaagagcgggaattcgtgtcctccgccatcggcaagggcggcgtcacaatctacgccgacagcgtgaagggcagattcaccatcagcagagataatagcaagaacaccctgtacctccagatgaacagcctgaagcccgaggacaccgccgtgtactattgtgctacagatgagagcacctaccgggactactggggccagggcacacaggtgaccgtgtctagcaccacgacgccagcgccgcggccaccaacaccggcgcccaccatcgcgtcgcagcccctgtccctgcgcccagaggcgtgccggccagcggcggggggcgcagtgcacacgagggggctggacttcgcctgtgatatctacatctgggcgcccttggccgggacttgtggggtccttctcctgtcactggttatcaccctttactgccggagggaccagaggctgccccccgatgcccacaagccccctgggggaggcagtttccggacccccatccaagaggagcaggccgacgcccactccaccctggccaagatcagagtgaagttcagcaggagcgcagacgcccccgcgtaccagcagggccagaaccagctctataacgagctcaatctaggacgaagagaggagtacgatgttttggacaagagacgtggccgggaccctgagatggggggaaagccgagaaggaagaaccctcaggaaggcctgtacaatgaactgcagaaagataagatggcggaggcctacagtgagattgggatgaaaggcgagcgccggaggggcaaggggcacgatggcctttaccagggtctcagtacagccaccaaggacacctacgacgcccttcacatgcaggccctgccccctcgcggctctggcgagggaaggggttccctgcttacttgcggcgacgtcgaagagaatcccggtccgatggccctcccagtaactgccctccttttgcccctcgcactccttcttcatgccgctcgccccaactgggtcaacgtgattagcgatttgaagaaaatcgaggaccttatacagtctatgcatattgacgctacactgtatactgagagtgatgtacacccgtcctgtaaggtaacggccatgaaatgctttcttctggagctccaggtcatcagcttggagtctggggacgcaagcatccacgatacggttgaaaacctcatcatccttgcgaacaactctctctcatctaatggaaacgttacagagagtgggtgtaaggagtgcgaagagttggaagaaaaaaacatcaaagaatttcttcaatccttcgttcacatagtgcaaatgttcattaacacgtccactaccacacccgccccgaggccacctacgccggcaccgactatcgccagtcaacccctctctctgcgccccgaggcttgccggcctgcggctggtggggcggtccacacccggggcctggattttgcgtgcgatatatacatctgggcacctcttgccggcacctgcggagtgctgcttctctcactcgttattacgctgtactgctaa

SEQ ID NO: 3512 - DNA, 1743 bp, synthetic construct
  misc_feature 1..1743: note = Synthetic
  source 1..1743: mol_type = other DNA
atggccttaccagtgaccgccttgctcctgccgctggccttgctgctccacgccgccaggccggaggtgcagctgctggaaagcggcggaggcctggtgcaacctggcggcagcctgagactgagctgcgctgcttctggatctctgtttcaggtcgagcacatcggctggttcagacaggcccctggcaaggaacgggacttcgtgtccgcccaggttacaggcggaggctacacctactacgccgacagcgtgaaaggcagattcaccatcagcagagataatagcaagaacaccctgtacctgcagatgaacagcctgaagcccgaggacaccgccgtgtactattgttacgtgcggctcgtggaagaggcctactggggccagggcacacaggtgaccgtgtccagcaccacgacgccagcgccgcggccaccaacaccggcgcccaccatcgcgtcgcagcccctgtccctgcgcccagaggcgtgccggccagcggcggggggcgcagtgcacacgagggggctggacttcgcctgtgatatctacatctgggcgcccttggccgggacttgtggggtccttctcctgtcactggttatcaccctttactgccggagggaccagaggctgccccccgatgcccacaagccccctgggggaggcagtttccggacccccatccaagaggagcaggccgacgcccactccaccctggccaagatcagagtgaagttcagcaggagcgcagacgcccccgcgtaccagcagggccagaaccagctctataacgagctcaatctaggacgaagagaggagtacgatgttttggacaagagacgtggccgggaccctgagatggggggaaagccgagaaggaagaaccctcaggaaggcctgtacaatgaactgcagaaagataagatggcggaggcctacagtgagattgggatgaaaggcgagcgccggaggggcaaggggcacgatggcctttaccagggtctcagtacagccaccaaggacacctacgacgcccttcacatgcaggccctgccccctcgcggctctggcgagggaaggggttccctgcttacttgcggcgacgtcgaagagaatcccggtccgatggccctcccagtaactgccctccttttgcccctcgcactccttcttcatgccgctcgccccaactgggtcaacgtgattagcgatttgaagaaaatcgaggaccttatacagtctatgcatattgacgctacactgtatactgagagtgatgtacacccgtcctgtaaggtaacggccatgaaatgctttcttctggagctccaggtcatcagcttggagtctggggacgcaagcatccacgatacggttgaaaacctcatcatccttgcgaacaactctctctcatctaatggaaacgttacagagagtgggtgtaaggagtgcgaagagttggaagaaaaaaacatcaaagaatttcttcaatccttcgttcacatagtgcaaatgttcattaacacgtccactaccacacccgccccgaggccacctacgccggcaccgactatcgccagtcaacccctctctctgcgccccgaggcttgccggcctgcggctggtggggcggtccacacccggggcctggattttgcgtgcgatatatacatctgggcacctcttgccggcacctgcggagtgctgcttctctcactcgttattacgctgtactgctaa

SEQ ID NO: 3513 - DNA, 1761 bp, synthetic construct
  misc_feature 1..1761: note = Synthetic
  source 1..1761: mol_type = other DNA
atggccttaccagtgaccgccttgctcctgccgctggccttgctgctccacgccgccaggccggaggtgcagctgctggaaagcggcggcggactggtgcaacctggcggatctctgcggttgtcttgtgctgccagcggaacaaccttcgcctctagctttatgggctggttccggcaggcccctggcaaggaaagagagttcgtgtccgccatcgtgttcccaggcggcagcacatactatgccgacagcgtgaagggcagattcaccatcagcagagataattcaaagaacaccctgtacctgcagatgaacagcctgaaacccgaggacaccgccgtgtactactgcgccgctagacggtacgagctggtcgacagactggaatacgcctactggggccagggcacacaggtgaccgtgtccagcaccacgacgccagcgccgcggccaccaacaccggcgcccaccatcgcgtcgcagcccctgtccctgcgcccagaggcgtgccggccagcggcggggggcgcagtgcacacgagggggctggacttcgcctgtgatatctacatctgggcgcccttggccgggacttgtggggtccttctcctgtcactggttatcaccctttactgccggagggaccagaggctgccccccgatgcccacaagccccctgggggaggcagtttccggacccccatccaagaggagcaggccgacgcccactccaccctggccaagatcagagtgaagttcagcaggagcgcagacgcccccgcgtaccagcagggccagaaccagctctataacgagctcaatctaggacgaagagaggagtacgatgttttggacaagagacgtggccgggaccctgagatggggggaaagccgagaaggaagaaccctcaggaaggcctgtacaatgaactgcagaaagataagatggcggaggcctacagtgagattgggatgaaaggcgagcgccggaggggcaaggggcacgatggcctttaccagggtctcagtacagccaccaaggacacctacgacgcccttcacatgcaggccctgccccctcgcggctctggcgagggaaggggttccctgcttacttgcggcgacgtcgaagagaatcccggtccgatggccctcccagtaactgccctccttttgcccctcgcactccttcttcatgccgctcgccccaactgggtcaacgtgattagcgatttgaagaaaatcgaggaccttatacagtctatgcatattgacgctacactgtatactgagagtgatgtacacccgtcctgtaaggtaacggccatgaaatgctttcttctggagctccaggtcatcagcttggagtctggggacgcaagcatccacgatacggttgaaaacctcatcatccttgcgaacaactctctctcatctaatggaaacgttacagagagtgggtgtaaggagtgcgaagagttggaagaaaaaaacatcaaagaatttcttcaatccttcgttcacatagtgcaaatgttcattaacacgtccactaccacacccgccccgaggccacctacgccggcaccgactatcgccagtcaacccctctctctgcgccccgaggcttgccggcctgcggctggtggggcggtccacacccggggcctggattttgcgtgcgatatatacatctgggcacctcttgccggcacctgcggagtgctgcttctctcactcgttattacgctgtactgctaa

SEQ ID NO: 3514 - DNA, 1746 bp, synthetic construct
  misc_feature 1..1746: note = Synthetic
  source 1..1746: mol_type = other DNA
atggccttaccagtgaccgccttgctcctgccgctggccttgctgctccacgccgccaggccggaggtgcagctgctggaaagcggcggcggactggttcagcctggaggaagcctgagactgtcttgtgccgcctctggctctgtgttcagcagctttaccatcggctggttccggcaggcccccggcaaggagagagaattcgtgtccgccatcgtgacaagcaccggcagcacatactacgctgatagcgtcaagggcagattcacaatcagcagagacaatagcaaaaacaccctgtacctgcaaatgaactccctcaagcctgaggacaccgccgtgtactactgcaacgtgcggacccaggaggactactactattggggccagggcacccaggtgaccgtgtccagcaccacgacgccagcgccgcggccaccaacaccggcgcccaccatcgcgtcgcagcccctgtccctgcgcccagaggcgtgccggccagcggcggggggcgcagtgcacacgagggggctggacttcgcctgtgatatctacatctgggcgcccttggccgggacttgtggggtccttctcctgtcactggttatcaccctttactgccggagggaccagaggctgccccccgatgcccacaagccccctgggggaggcagtttccggacccccatccaagaggagcaggccgacgcccactccaccctggccaagatcagagtgaagttcagcaggagcgcagacgcccccgcgtaccagcagggccagaaccagctctataacgagctcaatctaggacgaagagaggagtacgatgttttggacaagagacgtggccgggaccctgagatggggggaaagccgagaaggaagaaccctcaggaaggcctgtacaatgaactgcagaaagataagatggcggaggcctacagtgagattgggatgaaaggcgagcgccggaggggcaaggggcacgatggcctttaccagggtctcagtacagccaccaaggacacctacgacgcccttcacatgcaggccctgccccctcgcggctctggcgagggaaggggttccctgcttacttgcggcgacgtcgaagagaatcccggtccgatggccctcccagtaactgccctccttttgcccctcgcactccttcttcatgccgctcgccccaactgggtcaacgtgattagcgatttgaagaaaatcgaggaccttatacagtctatgcatattgacgctacactgtatactgagagtgatgtacacccgtcctgtaaggtaacggccatgaaatgctttcttctggagctccaggtcatcagcttggagtctggggacgcaagcatccacgatacggttgaaaacctcatcatccttgcgaacaactctctctcatctaatggaaacgttacagagagtgggtgtaaggagtgcgaagagttggaagaaaaaaacatcaaagaatttcttcaatccttcgttcacatagtgcaaatgttcattaacacgtccactaccacacccgccccgaggccacctacgccggcaccgactatcgccagtcaacccctctctctgcgccccgaggcttgccggcctgcggctggtggggcggtccacacccggggcctggattttgcgtgcgatatatacatctgggcacctcttgccggcacctgcggagtgctgcttctctcactcgttattacgctgtactgctaa

SEQ ID NO: 3515 - DNA, 1761 bp, synthetic construct
  misc_feature 1..1761: note = Synthetic
  source 1..1761: mol_type = other DNA
atggccttaccagtgaccgccttgctcctgccgctggccttgctgctccacgccgccaggccggaggtgcagctgctggaaagcggaggaggcctggtccagccaggcggctccctgagactgagctgtgccgcttctggcagcatcttcggcagccactttatgggctggttccggcaggcccctggcaaagagcgggaattcgtgtccgccgctgtgaccagcggcggatctacatattacgccgacagcgtgaagggcagattcaccatcagcagagataattctaagaacaccctgtacctgcagatgaacagcctcaagcccgaggacaccgccgtgtactactgcgccgccagaacctaccagagcacctaccaacctgagtacgcctactggggccagggcacacaggtgacagtgtccagcaccacgacgccagcgccgcggccaccaacaccggcgcccaccatcgcgtcgcagcccctgtccctgcgcccagaggcgtgccggccagcggcggggggcgcagtgcacacgagggggctggacttcgcctgtgatatctacatctgggcgcccttggccgggacttgtggggtccttctcctgtcactggttatcaccctttactgccggagggaccagaggctgccccccgatgcccacaagccccctgggggaggcagtttccggacccccatccaagaggagcaggccgacgcccactccaccctggccaagatcagagtgaagttcagcaggagcgcagacgcccccgcgtaccagcagggccagaaccagctctataacgagctcaatctaggacgaagagaggagtacgatgttttggacaagagacgtggccgggaccctgagatggggggaaagccgagaaggaagaaccctcaggaaggcctgtacaatgaactgcagaaagataagatggcggaggcctacagtgagattgggatgaaaggcgagcgccggaggggcaaggggcacgatggcctttaccagggtctcagtacagccaccaaggacacctacgacgcccttcacatgcaggccctgccccctcgcggctctggcgagggaaggggttccctgcttacttgcggcgacgtcgaagagaatcccggtccgatggccctcccagtaactgccctccttttgcccctcgcactccttcttcatgccgctcgccccaactgggtcaacgtgattagcgatttgaagaaaatcgaggaccttatacagtctatgcatattgacgctacactgtatactgagagtgatgtacacccgtcctgtaaggtaacggccatgaaatgctttcttctggagctccaggtcatcagcttggagtctggggacgcaagcatccacgatacggttgaaaacctcatcatccttgcgaacaactctctctcatctaatggaaacgttacagagagtgggtgtaaggagtgcgaagagttggaagaaaaaaacatcaaagaatttcttcaatccttcgttcacatagtgcaaatgttcattaacacgtccactaccacacccgccccgaggccacctacgccggcaccgactatcgccagtcaacccctctctctgcgccccgaggcttgccggcctgcggctggtggggcggtccacacccggggcctggattttgcgtgcgatatatacatctgggcacctcttgccggcacctgcggagtgctgcttctctcactcgttattacgctgtactgctaa

SEQ ID NO: 3516 - DNA, 1767 bp, synthetic construct
  misc_feature 1..1767: note = Synthetic
  source 1..1767: mol_type = other DNA
atggccttaccagtgaccgccttgctcctgccgctggccttgctgctccacgccgccaggccggaggtgcagctgctggaaagcggcggaggcctggtccaacctggcggcagcctgagactgtcttgtgctgcttccggatctatcttcagcatcctggacatcggctggttccgccaggcccctggcaaggaacgggaattcgtgtccgcctatatcagcagcggcggatctacatactacagcgacagcgtgaaaggcagattcaccattagcagagataatagcaagaacaccctgtacctgcagatgaacagcctcaagcccgaggacaccgccgtgtactactgcgtggccacaatctttggcgatagaaccgagggccaggagcggtacgccttctggggccagggcacacaggtgaccgtgtccagcaccacgacgccagcgccgcggccaccaacaccggcgcccaccatcgcgtcgcagcccctgtccctgcgcccagaggcgtgccggccagcggcggggggcgcagtgcacacgagggggctggacttcgcctgtgatatctacatctgggcgcccttggccgggacttgtggggtccttctcctgtcactggttatcaccctttactgccggagggaccagaggctgccccccgatgcccacaagccccctgggggaggcagtttccggacccccatccaagaggagcaggccgacgcccactccaccctggccaagatcagagtgaagttcagcaggagcgcagacgcccccgcgtaccagcagggccagaaccagctctataacgagctcaatctaggacgaagagaggagtacgatgttttggacaagagacgtggccgggaccctgagatggggggaaagccgagaaggaagaaccctcaggaaggcctgtacaatgaactgcagaaagataagatggcggaggcctacagtgagattgggatgaaaggcgagcgccggaggggcaaggggcacgatggcctttaccagggtctcagtacagccaccaaggacacctacgacgcccttcacatgcaggccctgccccctcgcggctctggcgagggaaggggttccctgcttacttgcggcgacgtcgaagagaatcccggtccgatggccctcccagtaactgccctccttttgcccctcgcactccttcttcatgccgctcgccccaactgggtcaacgtgattagcgatttgaagaaaatcgaggaccttatacagtctatgcatattgacgctacactgtatactgagagtgatgtacacccgtcctgtaaggtaacggccatgaaatgctttcttctggagctccaggtcatcagcttggagtctggggacgcaagcatccacgatacggttgaaaacctcatcatccttgcgaacaactctctctcatctaatggaaacgttacagagagtgggtgtaaggagtgcgaagagttggaagaaaaaaacatcaaagaatttcttcaatccttcgttcacatagtgcaaatgttcattaacacgtccactaccacacccgccccgaggccacctacgccggcaccgactatcgccagtcaacccctctctctgcgccccgaggcttgccggcctgcggctggtggggcggtccacacccggggcctggattttgcgtgcgatatatacatctgggcacctcttgccggcacctgcggagtgctgcttctctcactcgttattacgctgtactgctaa

SEQ ID NO: 3517 - DNA, 1761 bp, synthetic construct
  misc_feature 1..1761: note = Synthetic
  source 1..1761: mol_type = other DNA
atggccttaccagtgaccgccttgctcctgccgctggccttgctgctccacgccgccaggccggaggtgcagctgctggaaagcggaggcggcctggtccaaccaggcggatctctgcggctgagctgtgccgccagcggctctacaaccagcagctacttcatgggctggtttcggcaggcccctggcaaggaaagagagttcgtgtccgccatcatcacctcctccggcagcccctactacgccgacagcgtgaagggcagattcaccatcagcagagataatagcaagaacaccctgtacctccagatgaacagcctgaaacctgaggatacagccgtgtactactgcgctgctagacggtacggctctagagagacagacgactacggatattggggccagggcacccaggtgaccgtgtctagcaccacgacgccagcgccgcggccaccaacaccggcgcccaccatcgcgtcgcagcccctgtccctgcgcccagaggcgtgccggccagcggcggggggcgcagtgcacacgagggggctggacttcgcctgtgatatctacatctgggcgcccttggccgggacttgtggggtccttctcctgtcactggttatcaccctttactgccggagggaccagaggctgccccccgatgcccacaagccccctgggggaggcagtttccggacccccatccaagaggagcaggccgacgcccactccaccctggccaagatcagagtgaagttcagcaggagcgcagacgcccccgcgtaccagcagggccagaaccagctctataacgagctcaatctaggacgaagagaggagtacgatgttttggacaagagacgtggccgggaccctgagatggggggaaagccgagaaggaagaaccctcaggaaggcctgtacaatgaactgcagaaagataagatggcggaggcctacagtgagattgggatgaaaggcgagcgccggaggggcaaggggcacgatggcctttaccagggtctcagtacagccaccaaggacacctacgacgcccttcacatgcaggccctgccccctcgcggctctggcgagggaaggggttccctgcttacttgcggcgacgtcgaagagaatcccggtccgatggccctcccagtaactgccctccttttgcccctcgcactccttcttcatgccgctcgccccaactgggtcaacgtgattagcgatttgaagaaaatcgaggaccttatacagtctatgcatattgacgctacactgtatactgagagtgatgtacacccgtcctgtaaggtaacggccatgaaatgctttcttctggagctccaggtcatcagcttggagtctggggacgcaagcatccacgatacggttgaaaacctcatcatccttgcgaacaactctctctcatctaatggaaacgttacagagagtgggtgtaaggagtgcgaagagttggaagaaaaaaacatcaaagaatttcttcaatccttcgttcacatagtgcaaatgttcattaacacgtccactaccacacccgccccgaggccacctacgccggcaccgactatcgccagtcaacccctctctctgcgccccgaggcttgccggcctgcggctggtggggcggtccacacccggggcctggattttgcgtgcgatatatacatctgggcacctcttgccggcacctgcggagtgctgcttctctcactcgttattacgctgtactgctaa

SEQ ID NO: 3518 - DNA, 1764 bp, synthetic construct
  misc_feature 1..1764: note = Synthetic
  source 1..1764: mol_type = other DNA
atggccttaccagtgaccgccttgctcctgccgctggccttgctgctccacgccgccaggccggaggtgcagctgctggaaagcggcggcggcctggtgcaacctggaggctctctgcggctgagctgcgctgcttctggctccgtctttagcagctacagcatgtggttcagacaggcccctggcaaggaaagagagttcgtgtccgccattatcaccagcggcggcagcacctactacgccgatagcgtgaaaggcagattcaccatcagccgggacaatagcaagaacaccctgtacctgcagatgaacagcctcaagcccgaggacaccgccgtgtactattgtgtggccgtgtacggcatcggcacaggccagtacatcggaacatacgacatctggggacagggcacacaggtgaccgtgtctagcaccacgacgccagcgccgcggccaccaacaccggcgcccaccatcgcgtcgcagcccctgtccctgcgcccagaggcgtgccggccagcggcggggggcgcagtgcacacgagggggctggacttcgcctgtgatatctacatctgggcgcccttggccgggacttgtggggtccttctcctgtcactggttatcaccctttactgccggagggaccagaggctgccccccgatgcccacaagccccctgggggaggcagtttccggacccccatccaagaggagcaggccgacgcccactccaccctggccaagatcagagtgaagttcagcaggagcgcagacgcccccgcgtaccagcagggccagaaccagctctataacgagctcaatctaggacgaagagaggagtacgatgttttggacaagagacgtggccgggaccctgagatggggggaaagccgagaaggaagaaccctcaggaaggcctgtacaatgaactgcagaaagataagatggcggaggcctacagtgagattgggatgaaaggcgagcgccggaggggcaaggggcacgatggcctttaccagggtctcagtacagccaccaaggacacctacgacgcccttcacatgcaggccctgccccctcgcggctctggcgagggaaggggttccctgcttacttgcggcgacgtcgaagagaatcccggtccgatggccctcccagtaactgccctccttttgcccctcgcactccttcttcatgccgctcgccccaactgggtcaacgtgattagcgatttgaagaaaatcgaggaccttatacagtctatgcatattgacgctacactgtatactgagagtgatgtacacccgtcctgtaaggtaacggccatgaaatgctttcttctggagctccaggtcatcagcttggagtctggggacgcaagcatccacgatacggttgaaaacctcatcatccttgcgaacaactctctctcatctaatggaaacgttacagagagtgggtgtaaggagtgcgaagagttggaagaaaaaaacatcaaagaatttcttcaatccttcgttcacatagtgcaaatgttcattaacacgtccactaccacacccgccccgaggccacctacgccggcaccgactatcgccagtcaacccctctctctgcgccccgaggcttgccggcctgcggctggtggggcggtccacacccggggcctggattttgcgtgcgatatatacatctgggcacctcttgccggcacctgcggagtgctgcttctctcactcgttattacgctgtactgctaa

SEQ ID NO: 3519 - DNA, 1758 bp, synthetic construct
  misc_feature 1..1758: note = Synthetic
  source 1..1758: mol_type = other DNA
atggccttaccagtgaccgccttgctcctgccgctggccttgctgctccacgccgccaggccggaggtgcagctgctggaaagcggaggaggcctggtccaacctggaggatctctgcggctgagctgcgccgcttctggcagcctgctcagcatctacgacatgggctggtttagacaggcccctggcaaggaacgggaattcgtgtccgccagaatcggcaaaggcggctctacatactacgccgacagcgtgaagggcagattcaccatcagcagagataatagcaagaacaccctgtacctgcagatgaacagcctgaagcccgaggacacagccgtgtactattgtgctgtgctggtgggcgagggcgagagctacggctaccactactggggccagggcacccaggtgaccgtgtccagcaccacgacgccagcgccgcggccaccaacaccggcgcccaccatcgcgtcgcagcccctgtccctgcgcccagaggcgtgccggccagcggcggggggcgcagtgcacacgagggggctggacttcgcctgtgatatctacatctgggcgcccttggccgggacttgtggggtccttctcctgtcactggttatcaccctttactgccggagggaccagaggctgccccccgatgcccacaagccccctgggggaggcagtttccggacccccatccaagaggagcaggccgacgcccactccaccctggccaagatcagagtgaagttcagcaggagcgcagacgcccccgcgtaccagcagggccagaaccagctctataacgagctcaatctaggacgaagagaggagtacgatgttttggacaagagacgtggccgggaccctgagatggggggaaagccgagaaggaagaaccctcaggaaggcctgtacaatgaactgcagaaagataagatggcggaggcctacagtgagattgggatgaaaggcgagcgccggaggggcaaggggcacgatggcctttaccagggtctcagtacagccaccaaggacacctacgacgcccttcacatgcaggccctgccccctcgcggctctggcgagggaaggggttccctgcttacttgcggcgacgtcgaagagaatcccggtccgatggccctcccagtaactgccctccttttgcccctcgcactccttcttcatgccgctcgccccaactgggtcaacgtgattagcgatttgaagaaaatcgaggaccttatacagtctatgcatattgacgctacactgtatactgagagtgatgtacacccgtcctgtaaggtaacggccatgaaatgctttcttctggagctccaggtcatcagcttggagtctggggacgcaagcatccacgatacggttgaaaacctcatcatccttgcgaacaactctctctcatctaatggaaacgttacagagagtgggtgtaaggagtgcgaagagttggaagaaaaaaacatcaaagaatttcttcaatccttcgttcacatagtgcaaatgttcattaacacgtccactaccacacccgccccgaggccacctacgccggcaccgactatcgccagtcaacccctctctctgcgccccgaggcttgccggcctgcggctggtggggcggtccacacccggggcctggattttgcgtgcgatatatacatctgggcacctcttgccggcacctgcggagtgctgcttctctcactcgttattacgctgtactgctaa

SEQ ID NO: 3520 - DNA, 1764 bp, synthetic construct
  misc_feature 1..1764: note = Synthetic
  source 1..1764: mol_type = other DNA
atggccttaccagtgaccgccttgctcctgccgctggccttgctgctccacgccgccaggccggaggtgcagctgctggaaagcggcggcggactggtccaacctggaggcagcctgagactgtcttgtgccgccagcggcatcggcctctccatctactttatgggctggttccggcaggcccctggcaaggaacgggaattcgtgtccgccatcatcagcagcagcggatctacctactacgccgacagcgtgaaaggcagattcaccatctctagagataatagcaagaacaccctgtacctgcagatgaacagcctgaagcccgaggacaccgccgtgtactactgcgctgctagaaccggctacagcgagtacgagcaggaggactacggctattggggccagggcacacaggtgacagtgtccagcaccacgacgccagcgccgcggccaccaacaccggcgcccaccatcgcgtcgcagcccctgtccctgcgcccagaggcgtgccggccagcggcggggggcgcagtgcacacgagggggctggacttcgcctgtgatatctacatctgggcgcccttggccgggacttgtggggtccttctcctgtcactggttatcaccctttactgccggagggaccagaggctgccccccgatgcccacaagccccctgggggaggcagtttccggacccccatccaagaggagcaggccgacgcccactccaccctggccaagatcagagtgaagttcagcaggagcgcagacgcccccgcgtaccagcagggccagaaccagctctataacgagctcaatctaggacgaagagaggagtacgatgttttggacaagagacgtggccgggaccctgagatggggggaaagccgagaaggaagaaccctcaggaaggcctgtacaatgaactgcagaaagataagatggcggaggcctacagtgagattgggatgaaaggcgagcgccggaggggcaaggggcacgatggcctttaccagggtctcagtacagccaccaaggacacctacgacgcccttcacatgcaggccctgccccctcgcggctctggcgagggaaggggttccctgcttacttgcggcgacgtcgaagagaatcccggtccgatggccctcccagtaactgccctccttttgcccctcgcactccttcttcatgccgctcgccccaactgggtcaacgtgattagcgatttgaagaaaatcgaggaccttatacagtctatgcatattgacgctacactgtatactgagagtgatgtacacccgtcctgtaaggtaacggccatgaaatgctttcttctggagctccaggtcatcagcttggagtctggggacgcaagcatccacgatacggttgaaaacctcatcatccttgcgaacaactctctctcatctaatggaaacgttacagagagtgggtgtaaggagtgcgaagagttggaagaaaaaaacatcaaagaatttcttcaatccttcgttcacatagtgcaaatgttcattaacacgtccactaccacacccgccccgaggccacctacgccggcaccgactatcgccagtcaacccctctctctgcgccccgaggcttgccggcctgcggctggtggggcggtccacacccggggcctggattttgcgtgcgatatatacatctgggcacctcttgccggcacctgcggagtgctgcttctctcactcgttattacgctgtactgctaa

SEQ ID NO: 3521 - DNA, 1761 bp, synthetic construct
  misc_feature 1..1761: note = Synthetic
  source 1..1761: mol_type = other DNA
atggccttaccagtgaccgccttgctcctgccgctggccttgctgctccacgccgccaggccggaggtgcagctgctggaaagcggcggaggcctggtgcaacctggaggatctctcagactgagctgcgccgcttctggcagcatcttcagcagctccttcatcggctggttcagacaggcccctggcaaagagcgggaattcgtgtccgccgtgatcgcctcttctggcagcacctactacgccgacagcgtgaagggccggtttaccatcagcagagataatagcaagaacaccctgtacctgcagatgaacagcctgaagcccgaggacaccgccgtgtactattgtgctggcagattcggccagggcggcggcacagtcgagtacggctactggggccagggaacacaggtgaccgtgtccagcaccacgacgccagcgccgcggccaccaacaccggcgcccaccatcgcgtcgcagcccctgtccctgcgcccagaggcgtgccggccagcggcggggggcgcagtgcacacgagggggctggacttcgcctgtgatatctacatctgggcgcccttggccgggacttgtggggtccttctcctgtcactggttatcaccctttactgccggagggaccagaggctgccccccgatgcccacaagccccctgggggaggcagtttccggacccccatccaagaggagcaggccgacgcccactccaccctggccaagatcagagtgaagttcagcaggagcgcagacgcccccgcgtaccagcagggccagaaccagctctataacgagctcaatctaggacgaagagaggagtacgatgttttggacaagagacgtggccgggaccctgagatggggggaaagccgagaaggaagaaccctcaggaaggcctgtacaatgaactgcagaaagataagatggcggaggcctacagtgagattgggatgaaaggcgagcgccggaggggcaaggggcacgatggcctttaccagggtctcagtacagccaccaaggacacctacgacgcccttcacatgcaggccctgccccctcgcggctctggcgagggaaggggttccctgcttacttgcggcgacgtcgaagagaatcccggtccgatggccctcccagtaactgccctccttttgcccctcgcactccttcttcatgccgctcgccccaactgggtcaacgtgattagcgatttgaagaaaatcgaggaccttatacagtctatgcatattgacgctacactgtatactgagagtgatgtacacccgtcctgtaaggtaacggccatgaaatgctttcttctggagctccaggtcatcagcttggagtctggggacgcaagcatccacgatacggttgaaaacctcatcatccttgcgaacaactctctctcatctaatggaaacgttacagagagtgggtgtaaggagtgcgaagagttggaagaaaaaaacatcaaagaatttcttcaatccttcgttcacatagtgcaaatgttcattaacacgtccactaccacacccgccccgaggccacctacgccggcaccgactatcgccagtcaacccctctctctgcgccccgaggcttgccggcctgcggctggtggggcggtccacacccggggcctggattttgcgtgcgatatatacatctgggcacctcttgccggcacctgcggagtgctgcttctctcactcgttattacgctgtactgctaa

SEQ ID NO: 3522 - DNA, 1761 bp, synthetic construct
  misc_feature 1..1761: note = Synthetic
  source 1..1761: mol_type = other DNA
atggccttaccagtgaccgccttgctcctgccgctggccttgctgctccacgccgccaggccggaagtgcagctgctggaaagcggcggaggcctggtccaacctggaggatctctcagactgagctgtgccgccagcggcagagtgttcagcttctacttcatgggctggttccggcaggcccctggcaaagagcgggaatttgtgtccggcgtgatcggcaagacaggctctacatactacaccgacagcgtgaagggcagattcaccatcagcagagataatagcaagaacaccctgtacctgcagatgaacagcctgaagcccgaggacaccgccgtgtactactgcgctgcttctgagtaccagggcaccggctacggcgagtttgcctattggggccagggaacacaggtgaccgtgtccagcaccacgacgccagcgccgcggccaccaacaccggcgcccaccatcgcgtcgcagcccctgtccctgcgcccagaggcgtgccggccagcggcggggggcgcagtgcacacgagggggctggacttcgcctgtgatatctacatctgggcgcccttggccgggacttgtggggtccttctcctgtcactggttatcaccctttactgccggagggaccagaggctgccccccgatgcccacaagccccctgggggaggcagtttccggacccccatccaagaggagcaggccgacgcccactccaccctggccaagatcagagtgaagttcagcaggagcgcagacgcccccgcgtaccagcagggccagaaccagctctataacgagctcaatctaggacgaagagaggagtacgatgttttggacaagagacgtggccgggaccctgagatggggggaaagccgagaaggaagaaccctcaggaaggcctgtacaatgaactgcagaaagataagatggcggaggcctacagtgagattgggatgaaaggcgagcgccggaggggcaaggggcacgatggcctttaccagggtctcagtacagccaccaaggacacctacgacgcccttcacatgcaggccctgccccctcgcggctctggcgagggaaggggttccctgcttacttgcggcgacgtcgaagagaatcccggtccgatggccctcccagtaactgccctccttttgcccctcgcactccttcttcatgccgctcgccccaactgggtcaacgtgattagcgatttgaagaaaatcgaggaccttatacagtctatgcatattgacgctacactgtatactgagagtgatgtacacccgtcctgtaaggtaacggccatgaaatgctttcttctggagctccaggtcatcagcttggagtctggggacgcaagcatccacgatacggttgaaaacctcatcatccttgcgaacaactctctctcatctaatggaaacgttacagagagtgggtgtaaggagtgcgaagagttggaagaaaaaaacatcaaagaatttcttcaatccttcgttcacatagtgcaaatgttcattaacacgtccactaccacacccgccccgaggccacctacgccggcaccgactatcgccagtcaacccctctctctgcgccccgaggcttgccggcctgcggctggtggggcggtccacacccggggcctggattttgcgtgcgatatatacatctgggcacctcttgccggcacctgcggagtgctgcttctctcactcgttattacgctgtactgctaa

SEQ ID NO: 3523 - DNA, 1743 bp, synthetic construct
  misc_feature 1..1743: note = Synthetic
  source 1..1743: mol_type = other DNA
atggccttaccagtgaccgccttgctcctgccgctggccttgctgctccacgccgccaggccggaggtgcagctgctggaaagcggaggcggcctggtgcaacctggcggatctctgagactgagctgtgctgcttctggcagcctgttcgaggttgagcacatcggctggtttagacaggcccctggaaaagagcgggaattcgtgtccgcccaggtgaccggcggcggctacacctactatgccgacagcgtgaagggcagattcaccatcagcagagataatagcaagaacaccctgtacctgcagatgaacagcctcaagcccgaggacaccgccgtgtactactgctacgtgcggctggtcgaggaagcctactggggccagggcacacaggtgacagtgtccagcaccacgacgccagcgccgcggccaccaacaccggcgcccaccatcgcgtcgcagcccctgtccctgcgcccagaggcgtgccggccagcggcggggggcgcagtgcacacgagggggctggacttcgcctgtgatatctacatctgggcgcccttggccgggacttgtggggtccttctcctgtcactggttatcaccctttactgccggagggaccagaggctgccccccgatgcccacaagccccctgggggaggcagtttccggacccccatccaagaggagcaggccgacgcccactccaccctggccaagatcagagtgaagttcagcaggagcgcagacgcccccgcgtaccagcagggccagaaccagctctataacgagctcaatctaggacgaagagaggagtacgatgttttggacaagagacgtggccgggaccctgagatggggggaaagccgagaaggaagaaccctcaggaaggcctgtacaatgaactgcagaaagataagatggcggaggcctacagtgagattgggatgaaaggcgagcgccggaggggcaaggggcacgatggcctttaccagggtctcagtacagccaccaaggacacctacgacgcccttcacatgcaggccctgccccctcgcggctctggcgagggaaggggttccctgcttacttgcggcgacgtcgaagagaatcccggtccgatggccctcccagtaactgccctccttttgcccctcgcactccttcttcatgccgctcgccccaactgggtcaacgtgattagcgatttgaagaaaatcgaggaccttatacagtctatgcatattgacgctacactgtatactgagagtgatgtacacccgtcctgtaaggtaacggccatgaaatgctttcttctggagctccaggtcatcagcttggagtctggggacgcaagcatccacgatacggttgaaaacctcatcatccttgcgaacaactctctctcatctaatggaaacgttacagagagtgggtgtaaggagtgcgaagagttggaagaaaaaaacatcaaagaatttcttcaatccttcgttcacatagtgcaaatgttcattaacacgtccactaccacacccgccccgaggccacctacgccggcaccgactatcgccagtcaacccctctctctgcgccccgaggcttgccggcctgcggctggtggggcggtccacacccggggcctggattttgcgtgcgatatatacatctgggcacctcttgccggcacctgcggagtgctgcttctctcactcgttattacgctgtactgctaa

SEQ ID NO: 3524 - DNA, 1767 bp, synthetic construct
  misc_feature 1..1767: note = Synthetic
  source 1..1767: mol_type = other DNA
atggccttaccagtgaccgccttgctcctgccgctggccttgctgctccacgccgccaggccggaggtgcagctgctggaaagcggcggaggactggtccagcctggcggcagcctgcggctgagctgcgccgcctctggcagaatcttcggcgagtacttcatcggatggtttcggcaggccccaggaaaagagcgcgagttcgtgtccgccattatcacaggcagcggcatcacccactacgccgacagcgtgaagggcagattcaccatctccagagacaactctaagaataccctgtacctgcagatgaacagcctcaagcctgaagatacagccgtgtactactgtgctgctagaacagactacaccaccggccaagagctgcccgaatatggctactggggccagggcacccaggtgaccgtgagcagcaccacgacgccagcgccgcggccaccaacaccggcgcccaccatcgcgtcgcagcccctgtccctgcgcccagaggcgtgccggccagcggcggggggcgcagtgcacacgagggggctggacttcgcctgtgatatctacatctgggcgcccttggccgggacttgtggggtccttctcctgtcactggttatcaccctttactgccggagggaccagaggctgccccccgatgcccacaagccccctgggggaggcagtttccggacccccatccaagaggagcaggccgacgcccactccaccctggccaagatcagagtgaagttcagcaggagcgcagacgcccccgcgtaccagcagggccagaaccagctctataacgagctcaatctaggacgaagagaggagtacgatgttttggacaagagacgtggccgggaccctgagatggggggaaagccgagaaggaagaaccctcaggaaggcctgtacaatgaactgcagaaagataagatggcggaggcctacagtgagattgggatgaaaggcgagcgccggaggggcaaggggcacgatggcctttaccagggtctcagtacagccaccaaggacacctacgacgcccttcacatgcaggccctgccccctcgcggctctggcgagggaaggggttccctgcttacttgcggcgacgtcgaagagaatcccggtccgatggccctcccagtaactgccctccttttgcccctcgcactccttcttcatgccgctcgccccaactgggtcaacgtgattagcgatttgaagaaaatcgaggaccttatacagtctatgcatattgacgctacactgtatactgagagtgatgtacacccgtcctgtaaggtaacggccatgaaatgctttcttctggagctccaggtcatcagcttggagtctggggacgcaagcatccacgatacggttgaaaacctcatcatccttgcgaacaactctctctcatctaatggaaacgttacagagagtgggtgtaaggagtgcgaagagttggaagaaaaaaacatcaaagaatttcttcaatccttcgttcacatagtgcaaatgttcattaacacgtccactaccacacccgccccgaggccacctacgccggcaccgactatcgccagtcaacccctctctctgcgccccgaggcttgccggcctgcggctggtggggcggtccacacccggggcctggattttgcgtgcgatatatacatctgggcacctcttgccggcacctgcggagtgctgcttctctcactcgttattacgctgtactgctaa

SEQ ID NO: 3525 - DNA, 1752 bp, synthetic construct
  misc_feature 1..1752: note = Synthetic
  source 1..1752: mol_type = other DNA
atggccttaccagtgaccgccttgctcctgccgctggccttgctgctccacgccgccaggccggaggtgcagctgctggaaagcggcggcggcctcgtgcaacctggcggaagcctgagactgagctgcgccgcttctggctctatcgagagcatctacttcatcggctggttcagacaggcccctggcaaggaacgggaattcgtgtccgccgagtttatccccggaggcagcaccgtctacagcgacagcgtgaagggcagattcaccatcagcagagataacagcaagaacaccctgtacctgcagatgaacagcctgaaaccagaggacaccgccgtgtactactgtaatgccggcctggacgagggccggtactatacatactggggccagggcacacaggtgaccgtgtctagcaccacgacgccagcgccgcggccaccaacaccggcgcccaccatcgcgtcgcagcccctgtccctgcgcccagaggcgtgccggccagcggcggggggcgcagtgcacacgagggggctggacttcgcctgtgatatctacatctgggcgcccttggccgggacttgtggggtccttctcctgtcactggttatcaccctttactgccggagggaccagaggctgccccccgatgcccacaagccccctgggggaggcagtttccggacccccatccaagaggagcaggccgacgcccactccaccctggccaagatcagagtgaagttcagcaggagcgcagacgcccccgcgtaccagcagggccagaaccagctctataacgagctcaatctaggacgaagagaggagtacgatgttttggacaagagacgtggccgggaccctgagatggggggaaagccgagaaggaagaaccctcaggaaggcctgtacaatgaactgcagaaagataagatggcggaggcctacagtgagattgggatgaaaggcgagcgccggaggggcaaggggcacgatggcctttaccagggtctcagtacagccaccaaggacacctacgacgcccttcacatgcaggccctgccccctcgcggctctggcgagggaaggggttccctgcttacttgcggcgacgtcgaagagaatcccggtccgatggccctcccagtaactgccctccttttgcccctcgcactccttcttcatgccgctcgccccaactgggtcaacgtgattagcgatttgaagaaaatcgaggaccttatacagtctatgcatattgacgctacactgtatactgagagtgatgtacacccgtcctgtaaggtaacggccatgaaatgctttcttctggagctccaggtcatcagcttggagtctggggacgcaagcatccacgatacggttgaaaacctcatcatccttgcgaacaactctctctcatctaatggaaacgttacagagagtgggtgtaaggagtgcgaagagttggaagaaaaaaacatcaaagaatttcttcaatccttcgttcacatagtgcaaatgttcattaacacgtccactaccacacccgccccgaggccacctacgccggcaccgactatcgccagtcaacccctctctctgcgccccgaggcttgccggcctgcggctggtggggcggtccacacccggggcctggattttgcgtgcgatatatacatctgggcacctcttgccggcacctgcggagtgctgcttctctcactcgttattacgctgtactgctaa

SEQ ID NO: 3526 - DNA, 1743 bp, synthetic construct
  misc_feature 1..1743: note = Synthetic
  source 1..1743: mol_type = other DNA
atggccttaccagtgaccgccttgctcctgccgctggccttgctgctccacgccgccaggccggaggttcagctgctggaaagcggaggcggcctggtgcaacctggcggcagcctgcggctgagctgtgccgcttctggcatcgaggtgtctagcagcgtggtcggctggtttagacaggcccctggcaaggaaagagagttcgtgtccgccagcggcgtgggcggatctacatactacgctgatagcgtgaaaggcagattcaccatcagccgggacaatagcaagaacaccctgtacctgcagatgaacagcctcaagcccgaggacaccgccgtgtattactgctacgccgtgtacctgaccatctacacatactggggacagggcacacaggtgaccgtgtcctccaccacgacgccagcgccgcggccaccaacaccggcgcccaccatcgcgtcgcagcccctgtccctgcgcccagaggcgtgccggccagcggcggggggcgcagtgcacacgagggggctggacttcgcctgtgatatctacatctgggcgcccttggccgggacttgtggggtccttctcctgtcactggttatcaccctttactgccggagggaccagaggctgccccccgatgcccacaagccccctgggggaggcagtttccggacccccatccaagaggagcaggccgacgcccactccaccctggccaagatcagagtgaagttcagcaggagcgcagacgcccccgcgtaccagcagggccagaaccagctctataacgagctcaatctaggacgaagagaggagtacgatgttttggacaagagacgtggccgggaccctgagatggggggaaagccgagaaggaagaaccctcaggaaggcctgtacaatgaactgcagaaagataagatggcggaggcctacagtgagattgggatgaaaggcgagcgccggaggggcaaggggcacgatggcctttaccagggtctcagtacagccaccaaggacacctacgacgcccttcacatgcaggccctgccccctcgcggctctggcgagggaaggggttccctgcttacttgcggcgacgtcgaagagaatcccggtccgatggccctcccagtaactgccctccttttgcccctcgcactccttcttcatgccgctcgccccaactgggtcaacgtgattagcgatttgaagaaaatcgaggaccttatacagtctatgcatattgacgctacactgtatactgagagtgatgtacacccgtcctgtaaggtaacggccatgaaatgctttcttctggagctccaggtcatcagcttggagtctggggacgcaagcatccacgatacggttgaaaacctcatcatccttgcgaacaactctctctcatctaatggaaacgttacagagagtgggtgtaaggagtgcgaagagttggaagaaaaaaacatcaaagaatttcttcaatccttcgttcacatagtgcaaatgttcattaacacgtccactaccacacccgccccgaggccacctacgccggcaccgactatcgccagtcaacccctctctctgcgccccgaggcttgccggcctgcggctggtggggcggtccacacccggggcctggattttgcgtgcgatatatacatctgggcacctcttgccggcacctgcggagtgctgcttctctcactcgttattacgctgtactgctaa

SEQ ID NO: 3527 - DNA, 1746 bp, synthetic construct
  misc_feature 1..1746: note = Synthetic
  source 1..1746: mol_type = other DNA
atggccttaccagtgaccgccttgctcctgccgctggccttgctgctccacgccgccaggccggaggtgcagctcctggaaagcggcggaggcctggtgcaacctggaggctctctgagactgtcttgtgccgctagcggatttaccatctccagatacgccatggcctggttccggcaggcccctggcaaggaaagagagttcgtgtccggcagcatcttcgtgggcggcggcacatactatagagatagcgtgaaaggccgcttcaccatcagccgggacaatagcaagaacaccctgtacctgcagatgaacagcctgaagcccgaggacaccgccgtgtactactgctacgctacagtcggcgacagctactactactggggccagggcacccaggtgacagtgtctagcaccacgacgccagcgccgcggccaccaacaccggcgcccaccatcgcgtcgcagcccctgtccctgcgcccagaggcgtgccggccagcggcggggggcgcagtgcacacgagggggctggacttcgcctgtgatatctacatctgggcgcccttggccgggacttgtggggtccttctcctgtcactggttatcaccctttactgccggagggaccagaggctgccccccgatgcccacaagccccctgggggaggcagtttccggacccccatccaagaggagcaggccgacgcccactccaccctggccaagatcagagtgaagttcagcaggagcgcagacgcccccgcgtaccagcagggccagaaccagctctataacgagctcaatctaggacgaagagaggagtacgatgttttggacaagagacgtggccgggaccctgagatggggggaaagccgagaaggaagaaccctcaggaaggcctgtacaatgaactgcagaaagataagatggcggaggcctacagtgagattgggatgaaaggcgagcgccggaggggcaaggggcacgatggcctttaccagggtctcagtacagccaccaaggacacctacgacgcccttcacatgcaggccctgccccctcgcggctctggcgagggaaggggttccctgcttacttgcggcgacgtcgaagagaatcccggtccgatggccctcccagtaactgccctccttttgcccctcgcactccttcttcatgccgctcgccccaactgggtcaacgtgattagcgatttgaagaaaatcgaggaccttatacagtctatgcatattgacgctacactgtatactgagagtgatgtacacccgtcctgtaaggtaacggccatgaaatgctttcttctggagctccaggtcatcagcttggagtctggggacgcaagcatccacgatacggttgaaaacctcatcatccttgcgaacaactctctctcatctaatggaaacgttacagagagtgggtgtaaggagtgcgaagagttggaagaaaaaaacatcaaagaatttcttcaatccttcgttcacatagtgcaaatgttcattaacacgtccactaccacacccgccccgaggccacctacgccggcaccgactatcgccagtcaacccctctctctgcgccccgaggcttgccggcctgcggctggtggggcggtccacacccggggcctggattttgcgtgcgatatatacatctgggcacctcttgccggcacctgcggagtgctgcttctctcactcgttattacgctgtactgctaa

SEQ ID NO: 3528 - DNA, 1743 bp, synthetic construct
  misc_feature 1..1743: note = Synthetic
  source 1..1743: mol_type = other DNA
atggccttaccagtgaccgccttgctcctgccgctggccttgctgctccacgccgccaggccggaggtgcagctgctggaaagcggcggaggcctggtgcaacctggaggcagcctgagactgagctgcgctgcttctggcagcctgttcagcgtggaacacatcggctggtttagacaggcccctggcaaagagcgggagttcgtgtccgcccaggttacaggcggcggctacacctactacgccgacagcgtgaagggcagattcaccatcagcagagataatagcaagaacaccctgtacctgcagatgaacagcctcaagcccgaggacaccgccgtgtactattgttacgtgcggctggtcgaggaagcctactggggccagggcacccaggtgacagtgtcttctaccacgacgccagcgccgcggccaccaacaccggcgcccaccatcgcgtcgcagcccctgtccctgcgcccagaggcgtgccggccagcggcggggggcgcagtgcacacgagggggctggacttcgcctgtgatatctacatctgggcgcccttggccgggacttgtggggtccttctcctgtcactggttatcaccctttactgccggagggaccagaggctgccccccgatgcccacaagccccctgggggaggcagtttccggacccccatccaagaggagcaggccgacgcccactccaccctggccaagatcagagtgaagttcagcaggagcgcagacgcccccgcgtaccagcagggccagaaccagctctataacgagctcaatctaggacgaagagaggagtacgatgttttggacaagagacgtggccgggaccctgagatggggggaaagccgagaaggaagaaccctcaggaaggcctgtacaatgaactgcagaaagataagatggcggaggcctacagtgagattgggatgaaaggcgagcgccggaggggcaaggggcacgatggcctttaccagggtctcagtacagccaccaaggacacctacgacgcccttcacatgcaggccctgccccctcgcggctctggcgagggaaggggttccctgcttacttgcggcgacgtcgaagagaatcccggtccgatggccctcccagtaactgccctccttttgcccctcgcactccttcttcatgccgctcgccccaactgggtcaacgtgattagcgatttgaagaaaatcgaggaccttatacagtctatgcatattgacgctacactgtatactgagagtgatgtacacccgtcctgtaaggtaacggccatgaaatgctttcttctggagctccaggtcatcagcttggagtctggggacgcaagcatccacgatacggttgaaaacctcatcatccttgcgaacaactctctctcatctaatggaaacgttacagagagtgggtgtaaggagtgcgaagagttggaagaaaaaaacatcaaagaatttcttcaatccttcgttcacatagtgcaaatgttcattaacacgtccactaccacacccgccccgaggccacctacgccggcaccgactatcgccagtcaacccctctctctgcgccccgaggcttgccggcctgcggctggtggggcggtccacacccggggcctggattttgcgtgcgatatatacatctgggcacctcttgccggcacctgcggagtgctgcttctctcactcgttattacgctgtactgctaa

SEQ ID NO: 3529 - DNA, 1746 bp, synthetic construct
  misc_feature 1..1746: note = Synthetic
  source 1..1746: mol_type = other DNA
atggccttaccagtgaccgccttgctcctgccgctggccttgctgctccacgccgccaggccggaggtgcagctgctggaaagcggaggcggcctggtccaacctggaggcagcctgagactgagctgcgccgctagcggctttatcttcagcatctacgacatgggctggttccggcaggcccctggcaaagagcgggaattcgtgtccgccatctctacaacaggcggatctatctactacgccgacagcgtgaagggcagattcaccatcagcagagataacagcaagaacaccctgtacctgcagatgaactccctcaagcccgaggacaccgccgtgtactattgtaatgctgatccactggagagctacggctactggggccagggcacccaggtgaccgtgtctagcaccacgacgccagcgccgcggccaccaacaccggcgcccaccatcgcgtcgcagcccctgtccctgcgcccagaggcgtgccggccagcggcggggggcgcagtgcacacgagggggctggacttcgcctgtgatatctacatctgggcgcccttggccgggacttgtggggtccttctcctgtcactggttatcaccctttactgccggagggaccagaggctgccccccgatgcccacaagccccctgggggaggcagtttccggacccccatccaagaggagcaggccgacgcccactccaccctggccaagatcagagtgaagttcagcaggagcgcagacgcccccgcgtaccagcagggccagaaccagctctataacgagctcaatctaggacgaagagaggagtacgatgttttggacaagagacgtggccgggaccctgagatggggggaaagccgagaaggaagaaccctcaggaaggcctgtacaatgaactgcagaaagataagatggcggaggcctacagtgagattgggatgaaaggcgagcgccggaggggcaaggggcacgatggcctttaccagggtctcagtacagccaccaaggacacctacgacgcccttcacatgcaggccctgccccctcgcggctctggcgagggaaggggttccctgcttacttgcggcgacgtcgaagagaatcccggtccgatggccctcccagtaactgccctccttttgcccctcgcactccttcttcatgccgctcgccccaactgggtcaacgtgattagcgatttgaagaaaatcgaggaccttatacagtctatgcatattgacgctacactgtatactgagagtgatgtacacccgtcctgtaaggtaacggccatgaaatgctttcttctggagctccaggtcatcagcttggagtctggggacgcaagcatccacgatacggttgaaaacctcatcatccttgcgaacaactctctctcatctaatggaaacgttacagagagtgggtgtaaggagtgcgaagagttggaagaaaaaaacatcaaagaatttcttcaatccttcgttcacatagtgcaaatgttcattaacacgtccactaccacacccgccccgaggccacctacgccggcaccgactatcgccagtcaacccctctctctgcgccccgaggcttgccggcctgcggctggtggggcggtccacacccggggcctggattttgcgtgcgatatatacatctgggcacctcttgccggcacctgcggagtgctgcttctctcactcgttattacgctgtactgctaa

SEQ ID NO: 3530 - DNA, 1752 bp, synthetic construct
  misc_feature 1..1752: note = Synthetic
  source 1..1752: mol_type = other DNA
atggccttaccagtgaccgccttgctcctgccgctggccttgctgctccacgccgccaggccggaggtgcagctgctggaatctggcggcggactggtgcaacctggcggcagcctgagactgagctgcgccgcttctggctctgtgttcagctcctactttatcggctggttccggcaggcccctggaaaggaaagagagttcgtgtccgccgtgatctccagcagcggaagcacctactacgccgacagcgtgaaaggcagattcaccatcagccgggacaatagcaagaacaccctgtacctgcagatgaacagcctcaagcccgaggacacagctgtctactattgtgtggccagagaagatgtgggcgagccatacggctactggggccagggcacacaggtgaccgtgtctagcaccacgacgccagcgccgcggccaccaacaccggcgcccaccatcgcgtcgcagcccctgtccctgcgcccagaggcgtgccggccagcggcggggggcgcagtgcacacgagggggctggacttcgcctgtgatatctacatctgggcgcccttggccgggacttgtggggtccttctcctgtcactggttatcaccctttactgccggagggaccagaggctgccccccgatgcccacaagccccctgggggaggcagtttccggacccccatccaagaggagcaggccgacgcccactccaccctggccaagatcagagtgaagttcagcaggagcgcagacgcccccgcgtaccagcagggccagaaccagctctataacgagctcaatctaggacgaagagaggagtacgatgttttggacaagagacgtggccgggaccctgagatggggggaaagccgagaaggaagaaccctcaggaaggcctgtacaatgaactgcagaaagataagatggcggaggcctacagtgagattgggatgaaaggcgagcgccggaggggcaaggggcacgatggcctttaccagggtctcagtacagccaccaaggacacctacgacgcccttcacatgcaggccctgccccctcgcggctctggcgagggaaggggttccctgcttacttgcggcgacgtcgaagagaatcccggtccgatggccctcccagtaactgccctccttttgcccctcgcactccttcttcatgccgctcgccccaactgggtcaacgtgattagcgatttgaagaaaatcgaggaccttatacagtctatgcatattgacgctacactgtatactgagagtgatgtacacccgtcctgtaaggtaacggccatgaaatgctttcttctggagctccaggtcatcagcttggagtctggggacgcaagcatccacgatacggttgaaaacctcatcatccttgcgaacaactctctctcatctaatggaaacgttacagagagtgggtgtaaggagtgcgaagagttggaagaaaaaaacatcaaagaatttcttcaatccttcgttcacatagtgcaaatgttcattaacacgtccactaccacacccgccccgaggccacctacgccggcaccgactatcgccagtcaacccctctctctgcgccccgaggcttgccggcctgcggctggtggggcggtccacacccggggcctggattttgcgtgcgatatatacatctgggcacctcttgccggcacctgcggagtgctgcttctctcactcgttattacgctgtactgctaa

SEQ ID NO: 3531 - protein, 494 aa, synthetic construct
  REGION 1..494: note = Synthetic
MALPVTALLLPLALLLHAARPEVQLLESGGGLVQPGGSLRLSCAASGRGFTSYYMGWFRQAPGKEREFVSAVIFPEGYRYYADSVKGRFTISRDNSKNTLYLQMNSLKPEDTAVYYCAKYTGFGEDAYRYWGQGTQVTVSSGGGGSGGGGSGGGGSEVQLLESGGGLVQPGGSLRLSCAASGRGFTSYYMGWFRQAPGKEREFVSAVIFPEGYRYYADSVKGRFTISRDNSKNTLYLQMNSLKPEDTAVYYCAKYTGFGEDAYRYWGQGTQVTVSSTTTPAPRPPTPAPTIASQPLSLRPEACRPAAGGAVHTRGLDFACDIYIWAPLAGTCGVLLLSLVITLYCRRDQRLPPDAHKPPGGGSFRTPIQEEQADAHSTLAKIRVKFSRSADAPAYQQGQNQLYNELNLGRREEYDVLDKRRGRDPEMGGKPRRKNPQEGLYNELQKDKMAEAYSEIGMKGERRRGKGHDGLYQGLSTATKDTYDALHMQALPPR

SEQ ID NO: 3532 - protein, 492 aa, synthetic construct
  REGION 1..492: note = Synthetic
MALPVTALLLPLALLLHAARPEVQLLESGGGLVQPGGSLRLSCAASGLTFSIHTVGWFRQAPGKEREFVSAALGSGGRPYYRDSVKGRFTISRDNSKNTLYLQMNSLKPEDTAVYYCYVDVGTGLYYGYWGQGTQVTVSSGGGGSGGGGSGGGGSEVQLLESGGGLVQPGGSLRLSCAASGLTFSIHTVGWFRQAPGKEREFVSAALGSGGRPYYRDSVKGRFTISRDNSKNTLYLQMNSLKPEDTAVYYCYVDVGTGLYYGYWGQGTQVTVSSTTTPAPRPPTPAPTIASQPLSLRPEACRPAAGGAVHTRGLDFACDIYIWAPLAGTCGVLLLSLVITLYCRRDQRLPPDAHKPPGGGSFRTPIQEEQADAHSTLAKIRVKFSRSADAPAYQQGQNQLYNELNLGRREEYDVLDKRRGRDPEMGGKPRRKNPQEGLYNELQKDKMAEAYSEIGMKGERRRGKGHDGLYQGLSTATKDTYDALHMQALPPR

SEQ ID NO: 3533 - protein, 498 aa, synthetic construct
  REGION 1..498: note = Synthetic
MALPVTALLLPLALLLHAARPEVQLLESGGGLVQPGGSLRLSCAASGRIFSSYFMGWFRQAPGKEREFVSAHISSEGSTYYRDSVKGRFTISRDNSKNTLYLQMNSLKPEDTAVYYCAAREYADTQRGEYAYWGQGTQVTVSSGGGGSGGGGSGGGGSEVQLLESGGGLVQPGGSLRLSCAASGRIFSSYFMGWFRQAPGKEREFVSAHISSEGSTYYRDSVKGRFTISRDNSKNTLYLQMNSLKPEDTAVYYCAAREYADTQRGEYAYWGQGTQVTVSSTTTPAPRPPTPAPTIASQPLSLRPEACRPAAGGAVHTRGLDFACDIYIWAPLAGTCGVLLLSLVITLYCRRDQRLPPDAHKPPGGGSFRTPIQEEQADAHSTLAKIRVKFSRSADAPAYQQGQNQLYNELNLGRREEYDVLDKRRGRDPEMGGKPRRKNPQEGLYNELQKDKMAEAYSEIGMKGERRRGKGHDGLYQGLSTATKDTYDALHMQALPPR

SEQ ID NO: 3534 - protein, 488 aa, synthetic construct
  REGION 1..488: note = Synthetic
MALPVTALLLPLALLLHAARPEVQLLESGGGLVQPGGSLRLSCAASGSIVSSYAMGWFRQAPGKEREFVSSAIGKGGVTIYADSVKGRFTISRDNSKNTLYLQMNSLKPEDTAVYYCATDESTYRDYWGQGTQVTVSSGGGGSGGGGSGGGGSEVQLLESGGGLVQPGGSLRLSCAASGSIVSSYAMGWFRQAPGKEREFVSSAIGKGGVTIYADSVKGRFTISRDNSKNTLYLQMNSLKPEDTAVYYCATDESTYRDYWGQGTQVTVSSTTTPAPRPPTPAPTIASQPLSLRPEACRPAAGGAVHTRGLDFACDIYIWAPLAGTCGVLLLSLVITLYCRRDQRLPPDAHKPPGGGSFRTPIQEEQADAHSTLAKIRVKFSRSADAPAYQQGQNQLYNELNLGRREEYDVLDKRRGRDPEMGGKPRRKNPQEGLYNELQKDKMAEAYSEIGMKGERRRGKGHDGLYQGLSTATKDTYDALHMQALPPR

SEQ ID NO: 3535 - protein, 486 aa, synthetic construct
  REGION 1..486: note = Synthetic
MALPVTALLLPLALLLHAARPEVQLLESGGGLVQPGGSLRLSCAASGSLFQVEHIGWFRQAPGKERDFVSAQVTGGGYTYYADSVKGRFTISRDNSKNTLYLQMNSLKPEDTAVYYCYVRLVEEAYWGQGTQVTVSSGGGGSGGGGSGGGGSEVQLLESGGGLVQPGGSLRLSCAASGSLFQVEHIGWFRQAPGKERDFVSAQVTGGGYTYYADSVKGRFTISRDNSKNTLYLQMNSLKPEDTAVYYCYVRLVEEAYWGQGTQVTVSSTTTPAPRPPTPAPTIASQPLSLRPEACRPAAGGAVHTRGLDFACDIYIWAPLAGTCGVLLLSLVITLYCRRDQRLPPDAHKPPGGGSFRTPIQEEQADAHSTLAKIRVKFSRSADAPAYQQGQNQLYNELNLGRREEYDVLDKRRGRDPEMGGKPRRKNPQEGLYNELQKDKMAEAYSEIGMKGERRRGKGHDGLYQGLSTATKDTYDALHMQALPPR

SEQ ID NO: 3536 - protein, 498 aa, synthetic construct
  REGION 1..498: note = Synthetic
MALPVTALLLPLALLLHAARPEVQLLESGGGLVQPGGSLRLSCAASGTTFASSFMGWFRQAPGKEREFVSAIVFPGGSTYYADSVKGRFTISRDNSKNTLYLQMNSLKPEDTAVYYCAARRYELVDRLEYAYWGQGTQVTVSSGGGGSGGGGSGGGGSEVQLLESGGGLVQPGGSLRLSCAASGTTFASSFMGWFRQAPGKEREFVSAIVFPGGSTYYADSVKGRFTISRDNSKNTLYLQMNSLKPEDTAVYYCAARRYELVDRLEYAYWGQGTQVTVSSTTTPAPRPPTPAPTIASQPLSLRPEACRPAAGGAVHTRGLDFACDIYIWAPLAGTCGVLLLSLVITLYCRRDQRLPPDAHKPPGGGSFRTPIQEEQADAHSTLAKIRVKFSRSADAPAYQQGQNQLYNELNLGRREEYDVLDKRRGRDPEMGGKPRRKNPQEGLYNELQKDKMAEAYSEIGMKGERRRGKGHDGLYQGLSTATKDTYDALHMQALPPR

SEQ ID NO: 3537 - protein, 488 aa, synthetic construct
  REGION 1..488: note = Synthetic
MALPVTALLLPLALLLHAARPEVQLLESGGGLVQPGGSLRLSCAASGSVFSSFTIGWFRQAPGKEREFVSAIVTSTGSTYYADSVKGRFTISRDNSKNTLYLQMNSLKPEDTAVYYCNVRTQEDYYYWGQGTQVTVSSGGGGSGGGGSGGGGSEVQLLESGGGLVQPGGSLRLSCAASGSVFSSFTIGWFRQAPGKEREFVSAIVTSTGSTYYADSVKGRFTISRDNSKNTLYLQMNSLKPEDTAVYYCNVRTQEDYYYWGQGTQVTVSSTTTPAPRPPTPAPTIASQPLSLRPEACRPAAGGAVHTRGLDFACDIYIWAPLAGTCGVLLLSLVITLYCRRDQRLPPDAHKPPGGGSFRTPIQEEQADAHSTLAKIRVKFSRSADAPAYQQGQNQLYNELNLGRREEYDVLDKRRGRDPEMGGKPRRKNPQEGLYNELQKDKMAEAYSEIGMKGERRRGKGHDGLYQGLSTATKDTYDALHMQALPPR

SEQ ID NO: 3538 - protein, 498 aa, synthetic construct
  REGION 1..498: note = Synthetic
MALPVTALLLPLALLLHAARPEVQLLESGGGLVQPGGSLRLSCAASGSIFGSHFMGWFRQAPGKEREFVSAAVTSGGSTYYADSVKGRFTISRDNSKNTLYLQMNSLKPEDTAVYYCAARTYQSTYQPEYAYWGQGTQVTVSSGGGGSGGGGSGGGGSEVQLLESGGGLVQPGGSLRLSCAASGSIFGSHFMGWFRQAPGKEREFVSAAVTSGGSTYYADSVKGRFTISRDNSKNTLYLQMNSLKPEDTAVYYCAARTYQSTYQPEYAYWGQGTQVTVSSTTTPAPRPPTPAPTIASQPLSLRPEACRPAAGGAVHTRGLDFACDIYIWAPLAGTCGVLLLSLVITLYCRRDQRLPPDAHKPPGGGSFRTPIQEEQADAHSTLAKIRVKFSRSADAPAYQQGQNQLYNELNLGRREEYDVLDKRRGRDPEMGGKPRRKNPQEGLYNELQKDKMAEAYSEIGMKGERRRGKGHDGLYQGLSTATKDTYDALHMQALPPR

SEQ ID NO: 3539 - protein, 502 aa, synthetic construct
  REGION 1..502: note = Synthetic
MALPVTALLLPLALLLHAARPEVQLLESGGGLVQPGGSLRLSCAASGSIFSILDIGWFRQAPGKEREFVSAYISSGGSTYYSDSVKGRFTISRDNSKNTLYLQMNSLKPEDTAVYYCVATIFGDRTEGQERYAFWGQGTQVTVSSGGGGSGGGGSGGGGSEVQLLESGGGLVQPGGSLRLSCAASGSIFSILDIGWFRQAPGKEREFVSAYISSGGSTYYSDSVKGRFTISRDNSKNTLYLQMNSLKPEDTAVYYCVATIFGDRTEGQERYAFWGQGTQVTVSSTTTPAPRPPTPAPTIASQPLSLRPEACRPAAGGAVHTRGLDFACDIYIWAPLAGTCGVLLLSLVITLYCRRDQRLPPDAHKPPGGGSFRTPIQEEQADAHSTLAKIRVKFSRSADAPAYQQGQNQLYNELNLGRREEYDVLDKRRGRDPEMGGKPRRKNPQEGLYNELQKDKMAEAYSEIGMKGERRRGKGHDGLYQGLSTATKDTYDALHMQALPPR

SEQ ID NO: 3540 - protein, 498 aa, synthetic construct
  REGION 1..498: note = Synthetic
MALPVTALLLPLALLLHAARPEVQLLESGGGLVQPGGSLRLSCAASGSTTSSYFMGWFRQAPGKEREFVSAIITSSGSPYYADSVKGRFTISRDNSKNTLYLQMNSLKPEDTAVYYCAARRYGSRETDDYGYWGQGTQVTVSSGGGGSGGGGSGGGGSEVQLLESGGGLVQPGGSLRLSCAASGSTTSSYFMGWFRQAPGKEREFVSAIITSSGSPYYADSVKGRFTISRDNSKNTLYLQMNSLKPEDTAVYYCAARRYGSRETDDYGYWGQGTQVTVSSTTTPAPRPPTPAPTIASQPLSLRPEACRPAAGGAVHTRGLDFACDIYIWAPLAGTCGVLLLSLVITLYCRRDQRLPPDAHKPPGGGSFRTPIQEEQADAHSTLAKIRVKFSRSADAPAYQQGQNQLYNELNLGRREEYDVLDKRRGRDPEMGGKPRRKNPQEGLYNELQKDKMAEAYSEIGMKGERRRGKGHDGLYQGLSTATKDTYDALHMQALPPR

SEQ ID NO: 3541 - protein, 500 aa, synthetic construct
  REGION 1..500: note = Synthetic
MALPVTALLLPLALLLHAARPEVQLLESGGGLVQPGGSLRLSCAASGSVFSSYSMWFRQAPGKEREFVSAIITSGGSTYYADSVKGRFTISRDNSKNTLYLQMNSLKPEDTAVYYCVAVYGIGTGQYIGTYDIWGQGTQVTVSSGGGGSGGGGSGGGGSEVQLLESGGGLVQPGGSLRLSCAASGSVFSSYSMWFRQAPGKEREFVSAIITSGGSTYYADSVKGRFTISRDNSKNTLYLQMNSLKPEDTAVYYCVAVYGIGTGQYIGTYDIWGQGTQVTVSSTTTPAPRPPTPAPTIASQPLSLRPEACRPAAGGAVHTRGLDFACDIYIWAPLAGTCGVLLLSLVITLYCRRDQRLPPDAHKPPGGGSFRTPIQEEQADAHSTLAKIRVKFSRSADAPAYQQGQNQLYNELNLGRREEYDVLDKRRGRDPEMGGKPRRKNPQEGLYNELQKDKMAEAYSEIGMKGERRRGKGHDGLYQGLSTATKDTYDALHMQALPPR

SEQ ID NO: 3542 - protein, 496 aa, synthetic construct
  REGION 1..496: note = Synthetic
MALPVTALLLPLALLLHAARPEVQLLESGGGLVQPGGSLRLSCAASGSLLSIYDMGWFRQAPGKEREFVSARIGKGGSTYYADSVKGRFTISRDNSKNTLYLQMNSLKPEDTAVYYCAVLVGEGESYGYHYWGQGTQVTVSSGGGGSGGGGSGGGGSEVQLLESGGGLVQPGGSLRLSCAASGSLLSIYDMGWFRQAPGKEREFVSARIGKGGSTYYADSVKGRFTISRDNSKNTLYLQMNSLKPEDTAVYYCAVLVGEGESYGYHYWGQGTQVTVSSTTTPAPRPPTPAPTIASQPLSLRPEACRPAAGGAVHTRGLDFACDIYIWAPLAGTCGVLLLSLVITLYCRRDQRLPPDAHKPPGGGSFRTPIQEEQADAHSTLAKIRVKFSRSADAPAYQQGQNQLYNELNLGRREEYDVLDKRRGRDPEMGGKPRRKNPQEGLYNELQKDKMAEAYSEIGMKGERRRGKGHDGLYQGLSTATKDTYDALHMQALPPR

SEQ ID NO: 3543 - protein, 500 aa, synthetic construct
  REGION 1..500: note = Synthetic
MALPVTALLLPLALLLHAARPEVQLLESGGGLVQPGGSLRLSCAASGIGLSIYFMGWFRQAPGKEREFVSAIISSSGSTYYADSVKGRFTISRDNSKNTLYLQMNSLKPEDTAVYYCAARTGYSEYEQEDYGYWGQGTQVTVSSGGGGSGGGGSGGGGSEVQLLESGGGLVQPGGSLRLSCAASGIGLSIYFMGWFRQAPGKEREFVSAIISSSGSTYYADSVKGRFTISRDNSKNTLYLQMNSLKPEDTAVYYCAARTGYSEYEQEDYGYWGQGTQVTVSSTTTPAPRPPTPAPTIASQPLSLRPEACRPAAGGAVHTRGLDFACDIYIWAPLAGTCGVLLLSLVITLYCRRDQRLPPDAHKPPGGGSFRTPIQEEQADAHSTLAKIRVKFSRSADAPAYQQGQNQLYNELNLGRREEYDVLDKRRGRDPEMGGKPRRKNPQEGLYNELQKDKMAEAYSEIGMKGERRRGKGHDGLYQGLSTATKDTYDALHMQALPPR

SEQ ID NO: 3544 - protein, 498 aa, synthetic construct
  REGION 1..498: note = Synthetic
MALPVTALLLPLALLLHAARPEVQLLESGGGLVQPGGSLRLSCAASGSIFSSSFIGWFRQAPGKEREFVSAVIASSGSTYYADSVKGRFTISRDNSKNTLYLQMNSLKPEDTAVYYCAGRFGQGGGTVEYGYWGQGTQVTVSSGGGGSGGGGSGGGGSEVQLLESGGGLVQPGGSLRLSCAASGSIFSSSFIGWFRQAPGKEREFVSAVIASSGSTYYADSVKGRFTISRDNSKNTLYLQMNSLKPEDTAVYYCAGRFGQGGGTVEYGYWGQGTQVTVSSTTTPAPRPPTPAPTIASQPLSLRPEACRPAAGGAVHTRGLDFACDIYIWAPLAGTCGVLLLSLVITLYCRRDQRLPPDAHKPPGGGSFRTPIQEEQADAHSTLAKIRVKFSRSADAPAYQQGQNQLYNELNLGRREEYDVLDKRRGRDPEMGGKPRRKNPQEGLYNELQKDKMAEAYSEIGMKGERRRGKGHDGLYQGLSTATKDTYDALHMQALPPR

SEQ ID NO: 3545 - protein, 498 aa, synthetic construct
  REGION 1..498: note = Synthetic
MALPVTALLLPLALLLHAARPEVQLLESGGGLVQPGGSLRLSCAASGRVFSFYFMGWFRQAPGKEREFVSGVIGKTGSTYYTDSVKGRFTISRDNSKNTLYLQMNSLKPEDTAVYYCAASEYQGTGYGEFAYWGQGTQVTVSSGGGGSGGGGSGGGGSEVQLLESGGGLVQPGGSLRLSCAASGRVFSFYFMGWFRQAPGKEREFVSGVIGKTGSTYYTDSVKGRFTISRDNSKNTLYLQMNSLKPEDTAVYYCAASEYQGTGYGEFAYWGQGTQVTVSSTTTPAPRPPTPAPTIASQPLSLRPEACRPAAGGAVHTRGLDFACDIYIWAPLAGTCGVLLLSLVITLYCRRDQRLPPDAHKPPGGGSFRTPIQEEQADAHSTLAKIRVKFSRSADAPAYQQGQNQLYNELNLGRREEYDVLDKRRGRDPEMGGKPRRKNPQEGLYNELQKDKMAEAYSEIGMKGERRRGKGHDGLYQGLSTATKDTYDALHMQALPPR

SEQ ID NO: 3546 - protein, 486 aa, synthetic construct
  REGION 1..486: note = Synthetic
MALPVTALLLPLALLLHAARPEVQLLESGGGLVQPGGSLRLSCAASGSLFEVEHIGWFRQAPGKEREFVSAQVTGGGYTYYADSVKGRFTISRDNSKNTLYLQMNSLKPEDTAVYYCYVRLVEEAYWGQGTQVTVSSGGGGSGGGGSGGGGSEVQLLESGGGLVQPGGSLRLSCAASGSLFEVEHIGWFRQAPGKEREFVSAQVTGGGYTYYADSVKGRFTISRDNSKNTLYLQMNSLKPEDTAVYYCYVRLVEEAYWGQGTQVTVSSTTTPAPRPPTPAPTIASQPLSLRPEACRPAAGGAVHTRGLDFACDIYIWAPLAGTCGVLLLSLVITLYCRRDQRLPPDAHKPPGGGSFRTPIQEEQADAHSTLAKIRVKFSRSADAPAYQQGQNQLYNELNLGRREEYDVLDKRRGRDPEMGGKPRRKNPQEGLYNELQKDKMAEAYSEIGMKGERRRGKGHDGLYQGLSTATKDTYDALHMQALPPR

SEQ ID NO: 3547 - protein, 502 aa, synthetic construct
  REGION 1..502: note = Synthetic
MALPVTALLLPLALLLHAARPEVQLLESGGGLVQPGGSLRLSCAASGRIFGEYFIGWFRQAPGKEREFVSAIITGSGITHYADSVKGRFTISRDNSKNTLYLQMNSLKPEDTAVYYCAARTDYTTGQELPEYGYWGQGTQVTVSSGGGGSGGGGSGGGGSEVQLLESGGGLVQPGGSLRLSCAASGRIFGEYFIGWFRQAPGKEREFVSAIITGSGITHYADSVKGRFTISRDNSKNTLYLQMNSLKPEDTAVYYCAARTDYTTGQELPEYGYWGQGTQVTVSSTTTPAPRPPTPAPTIASQPLSLRPEACRPAAGGAVHTRGLDFACDIYIWAPLAGTCGVLLLSLVITLYCRRDQRLPPDAHKPPGGGSFRTPIQEEQADAHSTLAKIRVKFSRSADAPAYQQGQNQLYNELNLGRREEYDVLDKRRGRDPEMGGKPRRKNPQEGLYNELQKDKMAEAYSEIGMKGERRRGKGHDGLYQGLSTATKDTYDALHMQALPPR

SEQ ID NO: 3548 - protein, 492 aa, synthetic construct
  REGION 1..492: note = Synthetic
MALPVTALLLPLALLLHAARPEVQLLESGGGLVQPGGSLRLSCAASGSIESIYFIGWFRQAPGKEREFVSAEFIPGGSTVYSDSVKGRFTISRDNSKNTLYLQMNSLKPEDTAVYYCNAGLDEGRYYTYWGQGTQVTVSSGGGGSGGGGSGGGGSEVQLLESGGGLVQPGGSLRLSCAASGSIESIYFIGWFRQAPGKEREFVSAEFIPGGSTVYSDSVKGRFTISRDNSKNTLYLQMNSLKPEDTAVYYCNAGLDEGRYYTYWGQGTQVTVSSTTTPAPRPPTPAPTIASQPLSLRPEACRPAAGGAVHTRGLDFACDIYIWAPLAGTCGVLLLSLVITLYCRRDQRLPPDAHKPPGGGSFRTPIQEEQADAHSTLAKIRVKFSRSADAPAYQQGQNQLYNELNLGRREEYDVLDKRRGRDPEMGGKPRRKNPQEGLYNELQKDKMAEAYSEIGMKGERRRGKGHDGLYQGLSTATKDTYDALHMQALPPR

SEQ ID NO: 3549 - protein, 486 aa, synthetic construct
  REGION 1..486: note = Synthetic
MALPVTALLLPLALLLHAARPEVQLLESGGGLVQPGGSLRLSCAASGIEVSSSVVGWFRQAPGKEREFVSASGVGGSTYYADSVKGRFTISRDNSKNTLYLQMNSLKPEDTAVYYCYAVYLTIYTYWGQGTQVTVSSGGGGSGGGGSGGGGSEVQLLESGGGLVQPGGSLRLSCAASGIEVSSSVVGWFRQAPGKEREFVSASGVGGSTYYADSVKGRFTISRDNSKNTLYLQMNSLKPEDTAVYYCYAVYLTIYTYWGQGTQVTVSSTTTPAPRPPTPAPTIASQPLSLRPEACRPAAGGAVHTRGLDFACDIYIWAPLAGTCGVLLLSLVITLYCRRDQRLPPDAHKPPGGGSFRTPIQEEQADAHSTLAKIRVKFSRSADAPAYQQGQNQLYNELNLGRREEYDVLDKRRGRDPEMGGKPRRKNPQEGLYNELQKDKMAEAYSEIGMKGERRRGKGHDGLYQGLSTATKDTYDALHMQALPPR

SEQ ID NO: 3550 - protein, 488 aa, synthetic construct
  REGION 1..488: note = Synthetic
MALPVTALLLPLALLLHAARPEVQLLESGGGLVQPGGSLRLSCAASGFTISRYAMAWFRQAPGKEREFVSGSIFVGGGTYYRDSVKGRFTISRDNSKNTLYLQMNSLKPEDTAVYYCYATVGDSYYYWGQGTQVTVSSGGGGSGGGGSGGGGSEVQLLESGGGLVQPGGSLRLSCAASGFTISRYAMAWFRQAPGKEREFVSGSIFVGGGTYYRDSVKGRFTISRDNSKNTLYLQMNSLKPEDTAVYYCYATVGDSYYYWGQGTQVTVSSTTTPAPRPPTPAPTIASQPLSLRPEACRPAAGGAVHTRGLDFACDIYIWAPLAGTCGVLLLSLVITLYCRRDQRLPPDAHKPPGGGSFRTPIQEEQADAHSTLAKIRVKFSRSADAPAYQQGQNQLYNELNLGRREEYDVLDKRRGRDPEMGGKPRRKNPQEGLYNELQKDKMAEAYSEIGMKGERRRGKGHDGLYQGLSTATKDTYDALHMQALPPR

SEQ ID NO: 3551 - protein, 486 aa, synthetic construct
  REGION 1..486: note = Synthetic
MALPVTALLLPLALLLHAARPEVQLLESGGGLVQPGGSLRLSCAASGSLFSVEHIGWFRQAPGKEREFVSAQVTGGGYTYYADSVKGRFTISRDNSKNTLYLQMNSLKPEDTAVYYCYVRLVEEAYWGQGTQVTVSSGGGGSGGGGSGGGGSEVQLLESGGGLVQPGGSLRLSCAASGSLFSVEHIGWFRQAPGKEREFVSAQVTGGGYTYYADSVKGRFTISRDNSKNTLYLQMNSLKPEDTAVYYCYVRLVEEAYWGQGTQVTVSSTTTPAPRPPTPAPTIASQPLSLRPEACRPAAGGAVHTRGLDFACDIYIWAPLAGTCGVLLLSLVITLYCRRDQRLPPDAHKPPGGGSFRTPIQEEQADAHSTLAKIRVKFSRSADAPAYQQGQNQLYNELNLGRREEYDVLDKRRGRDPEMGGKPRRKNPQEGLYNELQKDKMAEAYSEIGMKGERRRGKGHDGLYQGLSTATKDTYDALHMQALPPR

SEQ ID NO: 3552 - protein, 488 aa, synthetic construct
  REGION 1..488: note = Synthetic
MALPVTALLLPLALLLHAARPEVQLLESGGGLVQPGGSLRLSCAASGFIFSIYDMGWFRQAPGKEREFVSAISTTGGSIYYADSVKGRFTISRDNSKNTLYLQMNSLKPEDTAVYYCNADPLESYGYWGQGTQVTVSSGGGGSGGGGSGGGGSEVQLLESGGGLVQPGGSLRLSCAASGFIFSIYDMGWFRQAPGKEREFVSAISTTGGSIYYADSVKGRFTISRDNSKNTLYLQMNSLKPEDTAVYYCNADPLESYGYWGQGTQVTVSSTTTPAPRPPTPAPTIASQPLSLRPEACRPAAGGAVHTRGLDFACDIYIWAPLAGTCGVLLLSLVITLYCRRDQRLPPDAHKPPGGGSFRTPIQEEQADAHSTLAKIRVKFSRSADAPAYQQGQNQLYNELNLGRREEYDVLDKRRGRDPEMGGKPRRKNPQEGLYNELQKDKMAEAYSEIGMKGERRRGKGHDGLYQGLSTATKDTYDALHMQALPPR

SEQ ID NO: 3553 - protein, 492 aa, synthetic construct
  REGION 1..492: note = Synthetic
MALPVTALLLPLALLLHAARPEVQLLESGGGLVQPGGSLRLSCAASGSVFSSYFIGWFRQAPGKEREFVSAVISSSGSTYYADSVKGRFTISRDNSKNTLYLQMNSLKPEDTAVYYCVAREDVGEPYGYWGQGTQVTVSSGGGGSGGGGSGGGGSEVQLLESGGGLVQPGGSLRLSCAASGSVFSSYFIGWFRQAPGKEREFVSAVISSSGSTYYADSVKGRFTISRDNSKNTLYLQMNSLKPEDTAVYYCVAREDVGEPYGYWGQGTQVTVSSTTTPAPRPPTPAPTIASQPLSLRPEACRPAAGGAVHTRGLDFACDIYIWAPLAGTCGVLLLSLVITLYCRRDQRLPPDAHKPPGGGSFRTPIQEEQADAHSTLAKIRVKFSRSADAPAYQQGQNQLYNELNLGRREEYDVLDKRRGRDPEMGGKPRRKNPQEGLYNELQKDKMAEAYSEIGMKGERRRGKGHDGLYQGLSTATKDTYDALHMQALPPR

SEQ ID NO: 3554 - DNA, 1482 bp, synthetic construct
  misc_feature 1..1482: note = Synthetic
  source 1..1482: mol_type = other DNA
atggccttaccagtgaccgccttgctcctgccgctggccttgctgctccacgccgccaggccggaggtgcagctgttggagtctgggggaggcttggtacagcctggggggtccctgagactctcctgtgcagcctctggaaggggctttacaagctattacatgggatggttccgccaggctccagggaaggaacgggagttcgtctcagctgtgattttcccggagggttaccgctactacgcagactccgtgaagggccggttcaccatctccagagacaattccaagaacacgctgtatctgcaaatgaacagcctgaagcccgaggacacggccgtatattactgtgcgaaatacacaggtttcggtgaggacgcctatcgctactggggccaagggacccaggtcaccgtctcctcaggtggaggcggttcaggcggaggtggctctggcggtggcggatcggaggtgcagctgttggagtctgggggaggcttggtacagcctggggggtccctgagactctcctgtgcagcctctggaaggggctttacaagctattacatgggatggttccgccaggctccagggaaggaacgggagttcgtctcagctgtgattttcccggagggttaccgctactacgcagactccgtgaagggccggttcaccatctccagagacaattccaagaacacgctgtatctgcaaatgaacagcctgaagcccgaggacacggccgtatattactgtgcgaaatacacaggtttcggtgaggacgcctatcgctactggggccaagggacccaggtcaccgtctcctcaaccacgacgccagcgccgcggccaccaacaccggcgcccaccatcgcgtcgcagcccctgtccctgcgcccagaggcgtgccggccagcggcggggggcgcagtgcacacgagggggctggacttcgcctgtgatatctacatctgggcgcccttggccgggacttgtggggtccttctcctgtcactggttatcaccctttactgccggagggaccagaggctgccccccgatgcccacaagccccctgggggaggcagtttccggacccccatccaagaggagcaggccgacgcccactccaccctggccaagatcagagtgaagttcagcaggagcgcagacgcccccgcgtaccagcagggccagaaccagctctataacgagctcaatctaggacgaagagaggagtacgatgttttggacaagagacgtggccgggaccctgagatggggggaaagccgagaaggaagaaccctcaggaaggcctgtacaatgaactgcagaaagataagatggcggaggcctacagtgagattgggatgaaaggcgagcgccggaggggcaaggggcacgatggcctttaccagggtctcagtacagccaccaaggacacctacgacgcccttcacatgcaggccctgccccctcgc

SEQ ID NO: 3555 - DNA, 1476 bp, synthetic construct
  misc_feature 1..1476: note = Synthetic
  source 1..1476: mol_type = other DNA
atggccttaccagtgaccgccttgctcctgccgctggccttgctgctccacgccgccaggccggaggtgcagctgttggagtctgggggaggcttggtacagcctggggggtccctgagactctcctgtgcagcctctggactcacctttagcatacatactgtgggatggttccgccaggctccagggaaggaaagagagttcgtctcagctgcactgggtagtgggggtcgaccttactaccgcgactccgtgaagggccggttcaccatctccagagacaattccaagaacacgctgtatctgcaaatgaacagcctgaaaccagaggacacggccgtatattactgttatgttgacgtggggacagggctgtactatggctactggggccaagggacccaggtcaccgtctcctcaggtggaggcggttcaggcggaggtggctctggcggtggcggatcggaggtgcagctgttggagtctgggggaggcttggtacagcctggggggtccctgagactctcctgtgcagcctctggactcacctttagcatacatactgtgggatggttccgccaggctccagggaaggaaagagagttcgtctcagctgcactgggtagtgggggtcgaccttactaccgcgactccgtgaagggccggttcaccatctccagagacaattccaagaacacgctgtatctgcaaatgaacagcctgaaaccagaggacacggccgtatattactgttatgttgacgtggggacagggctgtactatggctactggggccaagggacccaggtcaccgtctcctcaaccacgacgccagcgccgcggccaccaacaccggcgcccaccatcgcgtcgcagcccctgtccctgcgcccagaggcgtgccggccagcggcggggggcgcagtgcacacgagggggctggacttcgcctgtgatatctacatctgggcgcccttggccgggacttgtggggtccttctcctgtcactggttatcaccctttactgccggagggaccagaggctgccccccgatgcccacaagccccctgggggaggcagtttccggacccccatccaagaggagcaggccgacgcccactccaccctggccaagatcagagtgaagttcagcaggagcgcagacgcccccgcgtaccagcagggccagaaccagctctataacgagctcaatctaggacgaagagaggagtacgatgttttggacaagagacgtggccgggaccctgagatggggggaaagccgagaaggaagaaccctcaggaaggcctgtacaatgaactgcagaaagataagatggcggaggcctacagtgagattgggatgaaaggcgagcgccggaggggcaaggggcacgatggcctttaccagggtctcagtacagccaccaaggacacctacgacgcccttcacatgcaggccctgccccctcgc

SEQ ID NO: 3556 - DNA, 1494 bp, synthetic construct
  misc_feature 1..1494: note = Synthetic
  source 1..1494: mol_type = other DNA
atggccttaccagtgaccgccttgctcctgccgctggccttgctgctccacgccgccaggccggaggtgcagctgttggagtctgggggaggcttggtacagcctggggggtccctgagactctcctgtgcagcctctggaaggatctttagcagctattttatggggtggtttcgccaggctccagggaaggaacgggagtttgtctcagcccatattagtagcgaaggtagcacatactacagagactccgtgaagggccggttcaccatctccagagacaattccaagaacacgctgtatctgcaaatgaacagcctgaaaccagaggacacggccgtatattactgtgcggcccgcgagtacgcggatacacagcgcggcgagtacgcttactggggccaagggacccaagtcaccgtctcctcaggtggaggcggttcaggcggaggtggctctggcggtggcggatcggaggtgcagctgttggagtctgggggaggcttggtacagcctggggggtccctgagactctcctgtgcagcctctggaaggatctttagcagctattttatggggtggtttcgccaggctccagggaaggaacgggagtttgtctcagcccatattagtagcgaaggtagcacatactacagagactccgtgaagggccggttcaccatctccagagacaattccaagaacacgctgtatctgcaaatgaacagcctgaaaccagaggacacggccgtatattactgtgcggcccgcgagtacgcggatacacagcgcggcgagtacgcttactggggccaagggacccaagtcaccgtctcctcaaccacgacgccagcgccgcggccaccaacaccggcgcccaccatcgcgtcgcagcccctgtccctgcgcccagaggcgtgccggccagcggcggggggcgcagtgcacacgagggggctggacttcgcctgtgatatctacatctgggcgcccttggccgggacttgtggggtccttctcctgtcactggttatcaccctttactgccggagggaccagaggctgccccccgatgcccacaagccccctgggggaggcagtttccggacccccatccaagaggagcaggccgacgcccactccaccctggccaagatcagagtgaagttcagcaggagcgcagacgcccccgcgtaccagcagggccagaaccagctctataacgagctcaatctaggacgaagagaggagtacgatgttttggacaagagacgtggccgggaccctgagatggggggaaagccgagaaggaagaaccctcaggaaggcctgtacaatgaactgcagaaagataagatggcggaggcctacagtgagattgggatgaaaggcgagcgccggaggggcaaggggcacgatggcctttaccagggtctcagtacagccaccaaggacacctacgacgcccttcacatgcaggccctgccccctcgc

SEQ ID NO: 3557 - DNA, 1464 bp, synthetic construct
  misc_feature 1..1464: note = Synthetic
  source 1..1464: mol_type = other DNA
atggccttaccagtgaccgccttgctcctgccgctggccttgctgctccacgccgccaggccggaggtgcagctgttggagtctgggggaggcttggtacagcctggggggtccctgagactctcctgtgcagcctctggatctatagtcagcagctatgccatgggctggttccgccaggctccagggaaggaaagagagttcgtctcatccgctattggaaagggtggtgtaacaatttatgcagactccgtgaagggccggttcaccatctccagagataattccaagaacacgctgtatctgcaaatgaacagcctgaagccagaggacacggccgtatattactgtgcgacagatgagtctacttaccgtgactactggggccaagggacccaggtcaccgtctcctcaggtggaggcggttcaggcggaggtggctctggcggtggcggatcggaggtgcagctgttggagtctgggggaggcttggtacagcctggggggtccctgagactctcctgtgcagcctctggatctatagtcagcagctatgccatgggctggttccgccaggctccagggaaggaaagagagttcgtctcatccgctattggaaagggtggtgtaacaatttatgcagactccgtgaagggccggttcaccatctccagagataattccaagaacacgctgtatctgcaaatgaacagcctgaagccagaggacacggccgtatattactgtgcgacagatgagtctacttaccgtgactactggggccaagggacccaggtcaccgtctcctcaaccacgacgccagcgccgcggccaccaacaccggcgcccaccatcgcgtcgcagcccctgtccctgcgcccagaggcgtgccggccagcggcggggggcgcagtgcacacgagggggctggacttcgcctgtgatatctacatctgggcgcccttggccgggacttgtggggtccttctcctgtcactggttatcaccctttactgccggagggaccagaggctgccccccgatgcccacaagccccctgggggaggcagtttccggacccccatccaagaggagcaggccgacgcccactccaccctggccaagatcagagtgaagttcagcaggagcgcagacgcccccgcgtaccagcagggccagaaccagctctataacgagctcaatctaggacgaagagaggagtacgatgttttggacaagagacgtggccgggaccctgagatggggggaaagccgagaaggaagaaccctcaggaaggcctgtacaatgaactgcagaaagataagatggcggaggcctacagtgagattgggatgaaaggcgagcgccggaggggcaaggggcacgatggcctttaccagggtctcagtacagccaccaaggacacctacgacgcccttcacatgcaggccctgccccctcgc

SEQ ID NO: 3558 - DNA, 1458 bp, synthetic construct
  misc_feature 1..1458: note = Synthetic
  source 1..1458: mol_type = other DNA
atggccttaccagtgaccgccttgctcctgccgctggccttgctgctccacgccgccaggccggaggtgcagctgttggagtctgggggaggcttggtacagcctggggggtccctgagactctcctgtgcagcctctggatcactatttcaggtggagcacatcgggtggtttcgccaggctccagggaaggaaagagatttcgtctcagctcaagtcaccggtggcggttatacatactacgcagactccgtgaagggccggttcaccatctccagagacaattccaagaacacgctgtatctgcaaatgaacagcctgaaaccggaggacacggccgtatattactgttacgtacggctcgtggaagaagcatactggggccaagggacccaagtcaccgtctcctcaggtggaggcggttcaggcggaggtggctctggcggtggcggatcggaggtgcagctgttggagtctgggggaggcttggtacagcctggggggtccctgagactctcctgtgcagcctctggatcactatttcaggtggagcacatcgggtggtttcgccaggctccagggaaggaaagagatttcgtctcagctcaagtcaccggtggcggttatacatactacgcagactccgtgaagggccggttcaccatctccagagacaattccaagaacacgctgtatctgcaaatgaacagcctgaaaccggaggacacggccgtatattactgttacgtacggctcgtggaagaagcatactggggccaagggacccaagtcaccgtctcctcaaccacgacgccagcgccgcggccaccaacaccggcgcccaccatcgcgtcgcagcccctgtccctgcgcccagaggcgtgccggccagcggcggggggcgcagtgcacacgagggggctggacttcgcctgtgatatctacatctgggcgcccttggccgggacttgtggggtccttctcctgtcactggttatcaccctttactgccggagggaccagaggctgccccccgatgcccacaagccccctgggggaggcagtttccggacccccatccaagaggagcaggccgacgcccactccaccctggccaagatcagagtgaagttcagcaggagcgcagacgcccccgcgtaccagcagggccagaaccagctctataacgagctcaatctaggacgaagagaggagtacgatgttttggacaagagacgtggccgggaccctgagatggggggaaagccgagaaggaagaaccctcaggaaggcctgtacaatgaactgcagaaagataagatggcggaggcctacagtgagattgggatgaaaggcgagcgccggaggggcaaggggcacgatggcctttaccagggtctcagtacagccaccaaggacacctacgacgcccttcacatgcaggccctgccccctcgc

SEQ ID NO: 3559 - DNA, 1494 bp, synthetic construct
  misc_feature 1..1494: note = Synthetic
  source 1..1494: mol_type = other DNA
atggccttaccagtgaccgccttgctcctgccgctggccttgctgctccacgccgccaggccggaggtgcagctgttggagtctgggggaggcttggtacagcctggggggtccctgagactctcctgtgcagcctctggaacaacctttgccagctctttcatgggatggttccgccaggctccagggaaggagcgcgagtttgtctcagctattgtttttccggggggtagcacatactacgcagactccgtgaagggccggttcaccatctccagagacaattccaagaacacgctgtatctgcaaatgaacagcctgaagcctgaggacacggccgtatattactgtgcggctagaagatatgagttggtggacaggctggagtacgcctactggggccaagggacccaggtcaccgtctcctcaggtggaggcggttcaggcggaggtggctctggcggtggcggatcggaggtgcagctgttggagtctgggggaggcttggtacagcctggggggtccctgagactctcctgtgcagcctctggaacaacctttgccagctctttcatgggatggttccgccaggctccagggaaggagcgcgagtttgtctcagctattgtttttccggggggtagcacatactacgcagactccgtgaagggccggttcaccatctccagagacaattccaagaacacgctgtatctgcaaatgaacagcctgaagcctgaggacacggccgtatattactgtgcggctagaagatatgagttggtggacaggctggagtacgcctactggggccaagggacccaggtcaccgtctcctcaaccacgacgccagcgccgcggccaccaacaccggcgcccaccatcgcgtcgcagcccctgtccctgcgcccagaggcgtgccggccagcggcggggggcgcagtgcacacgagggggctggacttcgcctgtgatatctacatctgggcgcccttggccgggacttgtggggtccttctcctgtcactggttatcaccctttactgccggagggaccagaggctgccccccgatgcccacaagccccctgggggaggcagtttccggacccccatccaagaggagcaggccgacgcccactccaccctggccaagatcagagtgaagttcagcaggagcgcagacgcccccgcgtaccagcagggccagaaccagctctataacgagctcaatctaggacgaagagaggagtacgatgttttggacaagagacgtggccgggaccctgagatggggggaaagccgagaaggaagaaccctcaggaaggcctgtacaatgaactgcagaaagataagatggcggaggcctacagtgagattgggatgaaaggcgagcgccggaggggcaaggggcacgatggcctttaccagggtctcagtacagccaccaaggacacctacgacgcccttcacatgcaggccctgccccctcgc

SEQ ID NO: 3560 - DNA, 1464 bp, synthetic construct
  misc_feature 1..1464: note = Synthetic
  source 1..1464: mol_type = other DNA
atggccttaccagtgaccgccttgctcctgccgctggccttgctgctccacgccgccaggccggaggtgcagctgttggagtctgggggaggcttggtacagcctggggggtccctgagactctcctgtgcagcctctggaagcgtgtttagcagctttactattgggtggtttcgccaggctccagggaaggagcgcgagtttgtctcagctattgtcactagcaccggtagtacatactatgcagactccgtgaagggccggttcaccatctccagagacaattccaagaacacgctgtatctgcaaatgaacagcctgaaaccggaggacacggccgtatattactgtaatgtgaggacacaggaggactattactactggggccaagggacccaggtcaccgtctcctcaggtggaggcggttcaggcggaggtggctctggcggtggcggatcggaggtgcagctgttggagtctgggggaggcttggtacagcctggggggtccctgagactctcctgtgcagcctctggaagcgtgtttagcagctttactattgggtggtttcgccaggctccagggaaggagcgcgagtttgtctcagctattgtcactagcaccggtagtacatactatgcagactccgtgaagggccggttcaccatctccagagacaattccaagaacacgctgtatctgcaaatgaacagcctgaaaccggaggacacggccgtatattactgtaatgtgaggacacaggaggactattactactggggccaagggacccaggtcaccgtctcctcaaccacgacgccagcgccgcggccaccaacaccggcgcccaccatcgcgtcgcagcccctgtccctgcgcccagaggcgtgccggccagcggcggggggcgcagtgcacacgagggggctggacttcgcctgtgatatctacatctgggcgcccttggccgggacttgtggggtccttctcctgtcactggttatcaccctttactgccggagggaccagaggctgccccccgatgcccacaagccccctgggggaggcagtttccggacccccatccaagaggagcaggccgacgcccactccaccctggccaagatcagagtgaagttcagcaggagcgcagacgcccccgcgtaccagcagggccagaaccagctctataacgagctcaatctaggacgaagagaggagtacgatgttttggacaagagacgtggccgggaccctgagatggggggaaagccgagaaggaagaaccctcaggaaggcctgtacaatgaactgcagaaagataagatggcggaggcctacagtgagattgggatgaaaggcgagcgccggaggggcaaggggcacgatggcctttaccagggtctcagtacagccaccaaggacacctacgacgcccttcacatgcaggccctgccccctcgc

SEQ ID NO: 3561 - DNA, 1494 bp, synthetic construct
  misc_feature 1..1494: note = Synthetic
  source 1..1494: mol_type = other DNA
atggccttaccagtgaccgccttgctcctgccgctggccttgctgctccacgccgccaggccggaggtgcagctgttggagtctgggggaggcttggtacagcctggggggtccctgagactctcctgtgcagcctctggaagcatttttggcagccacttcatgggctggtttcgccaggctccagggaaggagcgggagttcgtctcagctgcggttaccagcggaggtagtacatactatgcagactccgtgaagggccggttcaccatctccagagacaattccaagaacacgctgtatctgcaaatgaacagcctgaaacctgaggacacggccgtatattactgtgcggctcgaacctaccagtcaacgtatcagcctgaatatgcctactggggccaagggacccaggtcaccgtctcctcaggtggaggcggttcaggcggaggtggctctggcggtggcggatcggaggtgcagctgttggagtctgggggaggcttggtacagcctggggggtccctgagactctcctgtgcagcctctggaagcatttttggcagccacttcatgggctggtttcgccaggctccagggaaggagcgggagttcgtctcagctgcggttaccagcggaggtagtacatactatgcagactccgtgaagggccggttcaccatctccagagacaattccaagaacacgctgtatctgcaaatgaacagcctgaaacctgaggacacggccgtatattactgtgcggctcgaacctaccagtcaacgtatcagcctgaatatgcctactggggccaagggacccaggtcaccgtctcctcaaccacgacgccagcgccgcggccaccaacaccggcgcccaccatcgcgtcgcagcccctgtccctgcgcccagaggcgtgccggccagcggcggggggcgcagtgcacacgagggggctggacttcgcctgtgatatctacatctgggcgcccttggccgggacttgtggggtccttctcctgtcactggttatcaccctttactgccggagggaccagaggctgccccccgatgcccacaagccccctgggggaggcagtttccggacccccatccaagaggagcaggccgacgcccactccaccctggccaagatcagagtgaagttcagcaggagcgcagacgcccccgcgtaccagcagggccagaaccagctctataacgagctcaatctaggacgaagagaggagtacgatgttttggacaagagacgtggccgggaccctgagatggggggaaagccgagaaggaagaaccctcaggaaggcctgtacaatgaactgcagaaagataagatggcggaggcctacagtgagattgggatgaaaggcgagcgccggaggggcaaggggcacgatggcctttaccagggtctcagtacagccaccaaggacacctacgacgcccttcacatgcaggccctgccccctcgc

SEQ ID NO: 3562 - DNA, 1506 bp, synthetic construct
  misc_feature 1..1506: note = Synthetic
  source 1..1506: mol_type = other DNA
atggccttaccagtgaccgccttgctcctgccgctggccttgctgctccacgccgccaggccggaggtgcagctgttggagtctgggggaggcttggtacagcctggggggtccctgagactctcctgtgcagcctctggatctatctttagcatcctggacatcgggtggttccgccaggctccagggaaggaacgagagttcgtctcagcctatattagcagcggtggtagtacatactattccgactccgtgaagggccggttcaccatctccagagataattccaagaacacgctgtatctgcaaatgaacagcctgaagccagaggacacggccgtatattactgtgtggctaccatctttggtgatcgtaccgagggccaggaaaggtacgctttctggggccaagggacccaagtcaccgtctcctcaggtggaggcggttcaggcggaggtggctctggcggtggcggatcggaggtgcagctgttggagtctgggggaggcttggtacagcctggggggtccctgagactctcctgtgcagcctctggatctatctttagcatcctggacatcgggtggttccgccaggctccagggaaggaacgagagttcgtctcagcctatattagcagcggtggtagtacatactattccgactccgtgaagggccggttcaccatctccagagataattccaagaacacgctgtatctgcaaatgaacagcctgaagccagaggacacggccgtatattactgtgtggctaccatctttggtgatcgtaccgagggccaggaaaggtacgctttctggggccaagggacccaagtcaccgtctcctcaaccacgacgccagcgccgcggccaccaacaccggcgcccaccatcgcgtcgcagcccctgtccctgcgcccagaggcgtgccggccagcggcggggggcgcagtgcacacgagggggctggacttcgcctgtgatatctacatctgggcgcccttggccgggacttgtggggtccttctcctgtcactggttatcaccctttactgccggagggaccagaggctgccccccgatgcccacaagccccctgggggaggcagtttccggacccccatccaagaggagcaggccgacgcccactccaccctggccaagatcagagtgaagttcagcaggagcgcagacgcccccgcgtaccagcagggccagaaccagctctataacgagctcaatctaggacgaagagaggagtacgatgttttggacaagagacgtggccgggaccctgagatggggggaaagccgagaaggaagaaccctcaggaaggcctgtacaatgaactgcagaaagataagatggcggaggcctacagtgagattgggatgaaaggcgagcgccggaggggcaaggggcacgatggcctttaccagggtctcagtacagccaccaaggacacctacgacgcccttcacatgcaggccctgccccctcgc

SEQ ID NO: 3563 - DNA, 1494 bp, synthetic construct
  misc_feature 1..1494: note = Synthetic
  source 1..1494: mol_type = other DNA
atggccttaccagtgaccgccttgctcctgccgctggccttgctgctccacgccgccaggccggaggtgcagctgttggagtctgggggaggcttggtacagcctggggggtccctgagactctcctgtgcagcctctggaagcaccacgagcagctattttatgggatggttccgccaggctccagggaaggaacgcgagtttgtctcagctattataactagcagtggtagtccctactatgcagactccgtgaagggccggttcaccatctccagagacaattccaagaacacgctgtatctgcaaatgaacagcctgaaacccgaggacacggccgtatattactgtgcggcgcgtcggtatgggtcgagggaaacggacgactatgggtactggggccaagggacccaggtcaccgtctcctcaggtggaggcggttcaggcggaggtggctctggcggtggcggatcggaggtgcagctgttggagtctgggggaggcttggtacagcctggggggtccctgagactctcctgtgcagcctctggaagcaccacgagcagctattttatgggatggttccgccaggctccagggaaggaacgcgagtttgtctcagctattataactagcagtggtagtccctactatgcagactccgtgaagggccggttcaccatctccagagacaattccaagaacacgctgtatctgcaaatgaacagcctgaaacccgaggacacggccgtatattactgtgcggcgcgtcggtatgggtcgagggaaacggacgactatgggtactggggccaagggacccaggtcaccgtctcctcaaccacgacgccagcgccgcggccaccaacaccggcgcccaccatcgcgtcgcagcccctgtccctgcgcccagaggcgtgccggccagcggcggggggcgcagtgcacacgagggggctggacttcgcctgtgatatctacatctgggcgcccttggccgggacttgtggggtccttctcctgtcactggttatcaccctttactgccggagggaccagaggctgccccccgatgcccacaagccccctgggggaggcagtttccggacccccatccaagaggagcaggccgacgcccactccaccctggccaagatcagagtgaagttcagcaggagcgcagacgcccccgcgtaccagcagggccagaaccagctctataacgagctcaatctaggacgaagagaggagtacgatgttttggacaagagacgtggccgggaccctgagatggggggaaagccgagaaggaagaaccctcaggaaggcctgtacaatgaactgcagaaagataagatggcggaggcctacagtgagattgggatgaaaggcgagcgccggaggggcaaggggcacgatggcctttaccagggtctcagtacagccaccaaggacacctacgacgcccttcacatgcaggccctgccccctcgc

SEQ ID NO: 3564 - DNA, 1500 bp, synthetic construct
  misc_feature 1..1500: note = Synthetic
  source 1..1500: mol_type = other DNA
atggccttaccagtgaccgccttgctcctgccgctggccttgctgctccacgccgccaggccggaggtgcagctgttggagtctgggggaggcttggtacagcctggggggtccctgagactctcctgtgcagcctctggatctgtctttagcagctatagcatgtggtttcgccaggctccagggaaggaacgcgagtttgtctcagctattatcactagtggcggtagcacatactacgcagactccgtgaagggccggttcaccatctccagagacaattccaagaacacgctgtatctgcaaatgaacagcctgaaacccgaggacacggccgtatattactgtgtggccgtttacggcataggaactggacaatacatcggtacatatgacatctggggccaagggacccaggtcaccgtctcctcaggtggaggcggttcaggcggaggtggctctggcggtggcggatcggaggtgcagctgttggagtctgggggaggcttggtacagcctggggggtccctgagactctcctgtgcagcctctggatctgtctttagcagctatagcatgtggtttcgccaggctccagggaaggaacgcgagtttgtctcagctattatcactagtggcggtagcacatactacgcagactccgtgaagggccggttcaccatctccagagacaattccaagaacacgctgtatctgcaaatgaacagcctgaaacccgaggacacggccgtatattactgtgtggccgtttacggcataggaactggacaatacatcggtacatatgacatctggggccaagggacccaggtcaccgtctcctcaaccacgacgccagcgccgcggccaccaacaccggcgcccaccatcgcgtcgcagcccctgtccctgcgcccagaggcgtgccggccagcggcggggggcgcagtgcacacgagggggctggacttcgcctgtgatatctacatctgggcgcccttggccgggacttgtggggtccttctcctgtcactggttatcaccctttactgccggagggaccagaggctgccccccgatgcccacaagccccctgggggaggcagtttccggacccccatccaagaggagcaggccgacgcccactccaccctggccaagatcagagtgaagttcagcaggagcgcagacgcccccgcgtaccagcagggccagaaccagctctataacgagctcaatctaggacgaagagaggagtacgatgttttggacaagagacgtggccgggaccctgagatggggggaaagccgagaaggaagaaccctcaggaaggcctgtacaatgaactgcagaaagataagatggcggaggcctacagtgagattgggatgaaaggcgagcgccggaggggcaaggggcacgatggcctttaccagggtctcagtacagccaccaaggacacctacgacgcccttcacatgcaggccctgccccctcgc

SEQ ID NO: 3565 - DNA, 1488 bp, synthetic construct
  misc_feature 1..1488: note = Synthetic
  source 1..1488: mol_type = other DNA
atggccttaccagtgaccgccttgctcctgccgctggccttgctgctccacgccgccaggccggaggtgcagctgttggagtctgggggaggcttggtacagcctggggggtccctgagactctcctgtgcagcctctggatccctactgagcatttatgatatgggctggtttcgccaggctccagggaaggagcgagagttcgtctcagcccgtattggcaaaggtggtagtacatactatgcagactccgtgaagggccggttcaccatctccagagataattccaagaacacgctgtatctgcaaatgaacagcctgaaaccggaggacacggccgtatattactgtgcggttctggttggtgagggtgaatcttacggctatcactactggggccaagggacccaggtcaccgtctcctcaggtggaggcggttcaggcggaggtggctctggcggtggcggatcggaggtgcagctgttggagtctgggggaggcttggtacagcctggggggtccctgagactctcctgtgcagcctctggatccctactgagcatttatgatatgggctggtttcgccaggctccagggaaggagcgagagttcgtctcagcccgtattggcaaaggtggtagtacatactatgcagactccgtgaagggccggttcaccatctccagagataattccaagaacacgctgtatctgcaaatgaacagcctgaaaccggaggacacggccgtatattactgtgcggttctggttggtgagggtgaatcttacggctatcactactggggccaagggacccaggtcaccgtctcctcaaccacgacgccagcgccgcggccaccaacaccggcgcccaccatcgcgtcgcagcccctgtccctgcgcccagaggcgtgccggccagcggcggggggcgcagtgcacacgagggggctggacttcgcctgtgatatctacatctgggcgcccttggccgggacttgtggggtccttctcctgtcactggttatcaccctttactgccggagggaccagaggctgccccccgatgcccacaagccccctgggggaggcagtttccggacccccatccaagaggagcaggccgacgcccactccaccctggccaagatcagagtgaagttcagcaggagcgcagacgcccccgcgtaccagcagggccagaaccagctctataacgagctcaatctaggacgaagagaggagtacgatgttttggacaagagacgtggccgggaccctgagatggggggaaagccgagaaggaagaaccctcaggaaggcctgtacaatgaactgcagaaagataagatggcggaggcctacagtgagattgggatgaaaggcgagcgccggaggggcaaggggcacgatggcctttaccagggtctcagtacagccaccaaggacacctacgacgcccttcacatgcaggccctgccccctcgc

SEQ ID NO: 3566 - DNA, 1500 bp, synthetic construct
  misc_feature 1..1500: note = Synthetic
  source 1..1500: mol_type = other DNA
atggccttaccagtgaccgccttgctcctgccgctggccttgctgctccacgccgccaggccggaggtgcagctgttggagtctgggggaggcttggtacagcctggggggtccctgagactctcctgtgcagcctctggaattggcctgagcatatatttcatgggatggtttcgccaggctccagggaaggagcgcgagtttgtctcagctattattagttctagtggtagcacatactacgcagactccgtgaagggccggttcaccatctccagagacaattccaagaacacgctgtatctgcaaatgaacagcctgaagccagaggacacggccgtatattactgtgcggctcgaaccggctactctgaatacgagcaggaagactatggctactggggccaagggacccaagtcaccgtctcctcaggtggaggcggttcaggcggaggtggctctggcggtggcggatcggaggtgcagctgttggagtctgggggaggcttggtacagcctggggggtccctgagactctcctgtgcagcctctggaattggcctgagcatatatttcatgggatggtttcgccaggctccagggaaggagcgcgagtttgtctcagctattattagttctagtggtagcacatactacgcagactccgtgaagggccggttcaccatctccagagacaattccaagaacacgctgtatctgcaaatgaacagcctgaagccagaggacacggccgtatattactgtgcggctcgaaccggctactctgaatacgagcaggaagactatggctactggggccaagggacccaagtcaccgtctcctcaaccacgacgccagcgccgcggccaccaacaccggcgcccaccatcgcgtcgcagcccctgtccctgcgcccagaggcgtgccggccagcggcggggggcgcagtgcacacgagggggctggacttcgcctgtgatatctacatctgggcgcccttggccgggacttgtggggtccttctcctgtcactggttatcaccctttactgccggagggaccagaggctgccccccgatgcccacaagccccctgggggaggcagtttccggacccccatccaagaggagcaggccgacgcccactccaccctggccaagatcagagtgaagttcagcaggagcgcagacgcccccgcgtaccagcagggccagaaccagctctataacgagctcaatctaggacgaagagaggagtacgatgttttggacaagagacgtggccgggaccctgagatggggggaaagccgagaaggaagaaccctcaggaaggcctgtacaatgaactgcagaaagataagatggcggaggcctacagtgagattgggatgaaaggcgagcgccggaggggcaaggggcacgatggcctttaccagggtctcagtacagccaccaaggacacctacgacgcccttcacatgcaggccctgccccctcgc

SEQ ID NO: 3567 - DNA, 1494 bp, synthetic construct
  misc_feature 1..1494: note = Synthetic
  source 1..1494: mol_type = other DNA
atggccttaccagtgaccgccttgctcctgccgctggccttgctgctccacgccgccaggccggaggtgcagctgttggagtctgggggaggcttggtacagcctggggggtccctgagactctcctgtgcagcctctggaagcatttttagcagctccttcatcggatggttccgccaggctccagggaaggagcgggagtttgtctcagctgtcattgctagcagtggtagtacatactatgcagactccgtgaagggccggttcaccatctccagagacaattccaagaacacgctgtatctgcaaatgaacagcctgaaaccagaggacacggccgtatattactgtgcgggccggttcgggcaggggggggggaccgtggaatatggctactggggccaagggacccaagtcaccgtctcctcaggtggaggcggttcaggcggaggtggctctggcggtggcggatcggaggtgcagctgttggagtctgggggaggcttggtacagcctggggggtccctgagactctcctgtgcagcctctggaagcatttttagcagctccttcatcggatggttccgccaggctccagggaaggagcgggagtttgtctcagctgtcattgctagcagtggtagtacatactatgcagactccgtgaagggccggttcaccatctccagagacaattccaagaacacgctgtatctgcaaatgaacagcctgaaaccagaggacacggccgtatattactgtgcgggccggttcgggcaggggggggggaccgtggaatatggctactggggccaagggacccaagtcaccgtctcctcaaccacgacgccagcgccgcggccaccaacaccggcgcccaccatcgcgtcgcagcccctgtccctgcgcccagaggcgtgccggccagcggcggggggcgcagtgcacacgagggggctggacttcgcctgtgatatctacatctgggcgcccttggccgggacttgtggggtccttctcctgtcactggttatcaccctttactgccggagggaccagaggctgccccccgatgcccacaagccccctgggggaggcagtttccggacccccatccaagaggagcaggccgacgcccactccaccctggccaagatcagagtgaagttcagcaggagcgcagacgcccccgcgtaccagcagggccagaaccagctctataacgagctcaatctaggacgaagagaggagtacgatgttttggacaagagacgtggccgggaccctgagatggggggaaagccgagaaggaagaaccctcaggaaggcctgtacaatgaactgcagaaagataagatggcggaggcctacagtgagattgggatgaaaggcgagcgccggaggggcaaggggcacgatggcctttaccagggtctcagtacagccaccaaggacacctacgacgcccttcacatgcaggccctgccccctcgc

SEQ ID NO: 3568 - DNA, 1494 bp, synthetic construct
  misc_feature 1..1494: note = Synthetic
  source 1..1494: mol_type = other DNA
atggccttaccagtgaccgccttgctcctgccgctggccttgctgctccacgccgccaggccggaggtgcagctgttggagtctgggggaggcttggtacagcctggggggtccctgagactctcctgtgcagcctctggacgagtgtttagcttctattttatggggtggttccgccaggctccagggaaggaaagggagttcgtcagtggcgttattggcaaaaccggtagtacatactatactgactccgtgaagggccggttcaccatctccagagataattccaagaacacgctgtatctgcaaatgaacagcctgaaacccgaggacacggccgtatattactgtgcggccagtgaataccaaggtaccgggtacggagaatttgcatactggggccaagggacccaggtcaccgtctcctcaggtggaggcggttcaggcggaggtggctctggcggtggcggatcggaggtgcagctgttggagtctgggggaggcttggtacagcctggggggtccctgagactctcctgtgcagcctctggacgagtgtttagcttctattttatggggtggttccgccaggctccagggaaggaaagggagttcgtcagtggcgttattggcaaaaccggtagtacatactatactgactccgtgaagggccggttcaccatctccagagataattccaagaacacgctgtatctgcaaatgaacagcctgaaacccgaggacacggccgtatattactgtgcggccagtgaataccaaggtaccgggtacggagaatttgcatactggggccaagggacccaggtcaccgtctcctcaaccacgacgccagcgccgcggccaccaacaccggcgcccaccatcgcgtcgcagcccctgtccctgcgcccagaggcgtgccggccagcggcggggggcgcagtgcacacgagggggctggacttcgcctgtgatatctacatctgggcgcccttggccgggacttgtggggtccttctcctgtcactggttatcaccctttactgccggagggaccagaggctgccccccgatgcccacaagccccctgggggaggcagtttccggacccccatccaagaggagcaggccgacgcccactccaccctggccaagatcagagtgaagttcagcaggagcgcagacgcccccgcgtaccagcagggccagaaccagctctataacgagctcaatctaggacgaagagaggagtacgatgttttggacaagagacgtggccgggaccctgagatggggggaaagccgagaaggaagaaccctcaggaaggcctgtacaatgaactgcagaaagataagatggcggaggcctacagtgagattgggatgaaaggcgagcgccggaggggcaaggggcacgatggcctttaccagggtctcagtacagccaccaaggacacctacgacgcccttcacatgcaggccctgccccctcgc

SEQ ID NO: 3569 - DNA, 1458 bp, synthetic construct
  misc_feature 1..1458: note = Synthetic
  source 1..1458: mol_type = other DNA
atggccttaccagtgaccgccttgctcctgccgctggccttgctgctccacgccgccaggccggaggtgcagctgttggagtctgggggaggcttggtacagcctggggggtccctgagactctcctgtgcagcctctggaagtttgtttgaagtcgaacacatcggatggttccgccaggctccagggaaggagagggagtttgtctcagctcaagtgaccggtggcggttatacatactacgcagactccgtgaagggccggttcaccatctccagagacaattccaagaacacgctgtatctgcaaatgaacagcctgaaaccggaggacacggccgtatattactgttacgtccggcttgtggaggaagcctactggggccaagggacccaagtcaccgtctcctcaggtggaggcggttcaggcggaggtggctctggcggtggcggatcggaggtgcagctgttggagtctgggggaggcttggtacagcctggggggtccctgagactctcctgtgcagcctctggaagtttgtttgaagtcgaacacatcggatggttccgccaggctccagggaaggagagggagtttgtctcagctcaagtgaccggtggcggttatacatactacgcagactccgtgaagggccggttcaccatctccagagacaattccaagaacacgctgtatctgcaaatgaacagcctgaaaccggaggacacggccgtatattactgttacgtccggcttgtggaggaagcctactggggccaagggacccaagtcaccgtctcctcaaccacgacgccagcgccgcggccaccaacaccggcgcccaccatcgcgtcgcagcccctgtccctgcgcccagaggcgtgccggccagcggcggggggcgcagtgcacacgagggggctggacttcgcctgtgatatctacatctgggcgcccttggccgggacttgtggggtccttctcctgtcactggttatcaccctttactgccggagggaccagaggctgccccccgatgcccacaagccccctgggggaggcagtttccggacccccatccaagaggagcaggccgacgcccactccaccctggccaagatcagagtgaagttcagcaggagcgcagacgcccccgcgtaccagcagggccagaaccagctctataacgagctcaatctaggacgaagagaggagtacgatgttttggacaagagacgtggccgggaccctgagatggggggaaagccgagaaggaagaaccctcaggaaggcctgtacaatgaactgcagaaagataagatggcggaggcctacagtgagattgggatgaaaggcgagcgccggaggggcaaggggcacgatggcctttaccagggtctcagtacagccaccaaggacacctacgacgcccttcacatgcaggccctgccccctcgc

SEQ ID NO: 3570 - DNA, 1506 bp, synthetic construct
  misc_feature 1..1506: note = Synthetic
  source 1..1506: mol_type = other DNA
atggccttaccagtgaccgccttgctcctgccgctggccttgctgctccacgccgccaggccggaggtgcagctgttggagtctgggggaggcttggtacagcctggggggtccctgagactctcctgtgcagcctctggacggatttttggagagtattttatcggatggttccgccaggctccagggaaggagcgggagttcgtctcagctattatcaccggcagtggtattacacactacgcagactccgtgaagggccggttcaccatctccagagacaattccaagaacacgctgtatctgcaaatgaacagcctgaaaccggaggacacggccgtatattactgtgcggcgcgcacagactacactacaggccaggaactaccagaatacgggtactggggccaagggacccaggtcaccgtctcctcaggtggaggcggttcaggcggaggtggctctggcggtggcggatcggaggtgcagctgttggagtctgggggaggcttggtacagcctggggggtccctgagactctcctgtgcagcctctggacggatttttggagagtattttatcggatggttccgccaggctccagggaaggagcgggagttcgtctcagctattatcaccggcagtggtattacacactacgcagactccgtgaagggccggttcaccatctccagagacaattccaagaacacgctgtatctgcaaatgaacagcctgaaaccggaggacacggccgtatattactgtgcggcgcgcacagactacactacaggccaggaactaccagaatacgggtactggggccaagggacccaggtcaccgtctcctcaaccacgacgccagcgccgcggccaccaacaccggcgcccaccatcgcgtcgcagcccctgtccctgcgcccagaggcgtgccggccagcggcggggggcgcagtgcacacgagggggctggacttcgcctgtgatatctacatctgggcgcccttggccgggacttgtggggtccttctcctgtcactggttatcaccctttactgccggagggaccagaggctgccccccgatgcccacaagccccctgggggaggcagtttccggacccccatccaagaggagcaggccgacgcccactccaccctggccaagatcagagtgaagttcagcaggagcgcagacgcccccgcgtaccagcagggccagaaccagctctataacgagctcaatctaggacgaagagaggagtacgatgttttggacaagagacgtggccgggaccctgagatggggggaaagccgagaaggaagaaccctcaggaaggcctgtacaatgaactgcagaaagataagatggcggaggcctacagtgagattgggatgaaaggcgagcgccggaggggcaaggggcacgatggcctttaccagggtctcagtacagccaccaaggacacctacgacgcccttcacatgcaggccctgccccctcgc

SEQ ID NO: 3571 - DNA, 1476 bp, synthetic construct
  misc_feature 1..1476: note = Synthetic
  source 1..1476: mol_type = other DNA
atggccttaccagtgaccgccttgctcctgccgctggccttgctgctccacgccgccaggccggaggtgcagctgttggagtctgggggaggcttggtacagcctggggggtccctgagactctcctgtgcagcctctggatcaattgagagcatttatttcatcgggtggtttcgccaggctccagggaaggagagagagtttgtctcagctgaattcatcccaggaggtagcacagtgtactcagactccgtgaagggccggttcaccatctccagagacaattccaagaacacgctgtatctgcaaatgaacagcctgaaacccgaggacacggccgtatattactgtaacgccggcctagacgaagggcggtactacacctactggggccaagggacccaggtcaccgtctcctcaggtggaggcggttcaggcggaggtggctctggcggtggcggatcggaggtgcagctgttggagtctgggggaggcttggtacagcctggggggtccctgagactctcctgtgcagcctctggatcaattgagagcatttatttcatcgggtggtttcgccaggctccagggaaggagagagagtttgtctcagctgaattcatcccaggaggtagcacagtgtactcagactccgtgaagggccggttcaccatctccagagacaattccaagaacacgctgtatctgcaaatgaacagcctgaaacccgaggacacggccgtatattactgtaacgccggcctagacgaagggcggtactacacctactggggccaagggacccaggtcaccgtctcctcaaccacgacgccagcgccgcggccaccaacaccggcgcccaccatcgcgtcgcagcccctgtccctgcgcccagaggcgtgccggccagcggcggggggcgcagtgcacacgagggggctggacttcgcctgtgatatctacatctgggcgcccttggccgggacttgtggggtccttctcctgtcactggttatcaccctttactgccggagggaccagaggctgccccccgatgcccacaagccccctgggggaggcagtttccggacccccatccaagaggagcaggccgacgcccactccaccctggccaagatcagagtgaagttcagcaggagcgcagacgcccccgcgtaccagcagggccagaaccagctctataacgagctcaatctaggacgaagagaggagtacgatgttttggacaagagacgtggccgggaccctgagatggggggaaagccgagaaggaagaaccctcaggaaggcctgtacaatgaactgcagaaagataagatggcggaggcctacagtgagattgggatgaaaggcgagcgccggaggggcaaggggcacgatggcctttaccagggtctcagtacagccaccaaggacacctacgacgcccttcacatgcaggccctgccccctcgc

SEQ ID NO: 3572 - DNA, 1458 bp, synthetic construct
  misc_feature 1..1458: note = Synthetic
  source 1..1458: mol_type = other DNA
atggccttaccagtgaccgccttgctcctgccgctggccttgctgctccacgccgccaggccggaggtgcagctgttggagtctgggggaggcttggtacagcctggggggtccctgagactctcctgtgcagcctctggaatagaggtcagcagcagtgtagtgggttggtttcgccaggctccagggaaggagcgggagtttgtctcagctagcggtgtgggaggtagcacatactacgcagactccgtgaagggccggttcaccatctccagagacaattccaagaacacgctgtatctgcaaatgaacagcctgaagcctgaggacacggccgtatattactgttatgcagtgtacttgaccatctacacctactggggccaagggacccaggtcaccgtctcctcaggtggaggcggttcaggcggaggtggctctggcggtggcggatcggaggtgcagctgttggagtctgggggaggcttggtacagcctggggggtccctgagactctcctgtgcagcctctggaatagaggtcagcagcagtgtagtgggttggtttcgccaggctccagggaaggagcgggagtttgtctcagctagcggtgtgggaggtagcacatactacgcagactccgtgaagggccggttcaccatctccagagacaattccaagaacacgctgtatctgcaaatgaacagcctgaagcctgaggacacggccgtatattactgttatgcagtgtacttgaccatctacacctactggggccaagggacccaggtcaccgtctcctcaaccacgacgccagcgccgcggccaccaacaccggcgcccaccatcgcgtcgcagcccctgtccctgcgcccagaggcgtgccggccagcggcggggggcgcagtgcacacgagggggctggacttcgcctgtgatatctacatctgggcgcccttggccgggacttgtggggtccttctcctgtcactggttatcaccctttactgccggagggaccagaggctgccccccgatgcccacaagccccctgggggaggcagtttccggacccccatccaagaggagcaggccgacgcccactccaccctggccaagatcagagtgaagttcagcaggagcgcagacgcccccgcgtaccagcagggccagaaccagctctataacgagctcaatctaggacgaagagaggagtacgatgttttggacaagagacgtggccgggaccctgagatggggggaaagccgagaaggaagaaccctcaggaaggcctgtacaatgaactgcagaaagataagatggcggaggcctacagtgagattgggatgaaaggcgagcgccggaggggcaaggggcacgatggcctttaccagggtctcagtacagccaccaaggacacctacgacgcccttcacatgcaggccctgccccctcgc

SEQ ID NO: 3573 - DNA, 1464 bp, synthetic construct
  misc_feature 1..1464: note = Synthetic
  source 1..1464: mol_type = other DNA
atggccttaccagtgaccgccttgctcctgccgctggccttgctgctccacgccgccaggccggaggtgcagctgttggagtctgggggaggcttggtacagcctggggggtccctgagactctcctgtgcagcctctggattcaccatcagcagatatgccatggcatggtttcgccaggctccagggaaggaacgcgagttcgtcagtgggagcattttcgttggtggtggcacatactatagggactccgtgaagggccggttcaccatctccagagataattccaagaacacgctgtatctgcaaatgaacagcctgaaacctgaggacacggccgtatattactgttatgccaccgtgggtgactcctattattactggggccaagggacccaggtcaccgtctcctcaggtggaggcggttcaggcggaggtggctctggcggtggcggatcggaggtgcagctgttggagtctgggggaggcttggtacagcctggggggtccctgagactctcctgtgcagcctctggattcaccatcagcagatatgccatggcatggtttcgccaggctccagggaaggaacgcgagttcgtcagtgggagcattttcgttggtggtggcacatactatagggactccgtgaagggccggttcaccatctccagagataattccaagaacacgctgtatctgcaaatgaacagcctgaaacctgaggacacggccgtatattactgttatgccaccgtgggtgactcctattattactggggccaagggacccaggtcaccgtctcctcaaccacgacgccagcgccgcggccaccaacaccggcgcccaccatcgcgtcgcagcccctgtccctgcgcccagaggcgtgccggccagcggcggggggcgcagtgcacacgagggggctggacttcgcctgtgatatctacatctgggcgcccttggccgggacttgtggggtccttctcctgtcactggttatcaccctttactgccggagggaccagaggctgccccccgatgcccacaagccccctgggggaggcagtttccggacccccatccaagaggagcaggccgacgcccactccaccctggccaagatcagagtgaagttcagcaggagcgcagacgcccccgcgtaccagcagggccagaaccagctctataacgagctcaatctaggacgaagagaggagtacgatgttttggacaagagacgtggccgggaccctgagatggggggaaagccgagaaggaagaaccctcaggaaggcctgtacaatgaactgcagaaagataagatggcggaggcctacagtgagattgggatgaaaggcgagcgccggaggggcaaggggcacgatggcctttaccagggtctcagtacagccaccaaggacacctacgacgcccttcacatgcaggccctgccccctcgc

SEQ ID NO: 3574 - DNA, 1458 bp, synthetic construct
  misc_feature 1..1458: note = Synthetic
  source 1..1458: mol_type = other DNA
atggccttaccagtgaccgccttgctcctgccgctggccttgctgctccacgccgccaggccggaggtgcagctgttggagtctgggggaggcttggtacagcctggggggtccctgagactctcctgtgcagcctctggaagcctgtttagcgttgagcacatcggctggttccgccaggctccagggaaggagagagagtttgtctcagctcaggtaaccggtgggggttatacatactacgcagactccgtgaagggccggttcaccatctccagagacaattccaagaacacgctgtatctgcaaatgaacagcctgaaaccagaggacacggccgtatattactgttatgttagacttgtggaggaagcttactggggccaagggacccaggtcaccgtctcctcaggtggaggcggttcaggcggaggtggctctggcggtggcggatcggaggtgcagctgttggagtctgggggaggcttggtacagcctggggggtccctgagactctcctgtgcagcctctggaagcctgtttagcgttgagcacatcggctggttccgccaggctccagggaaggagagagagtttgtctcagctcaggtaaccggtgggggttatacatactacgcagactccgtgaagggccggttcaccatctccagagacaattccaagaacacgctgtatctgcaaatgaacagcctgaaaccagaggacacggccgtatattactgttatgttagacttgtggaggaagcttactggggccaagggacccaggtcaccgtctcctcaaccacgacgccagcgccgcggccaccaacaccggcgcccaccatcgcgtcgcagcccctgtccctgcgcccagaggcgtgccggccagcggcggggggcgcagtgcacacgagggggctggacttcgcctgtgatatctacatctgggcgcccttggccgggacttgtggggtccttctcctgtcactggttatcaccctttactgccggagggaccagaggctgccccccgatgcccacaagccccctgggggaggcagtttccggacccccatccaagaggagcaggccgacgcccactccaccctggccaagatcagagtgaagttcagcaggagcgcagacgcccccgcgtaccagcagggccagaaccagctctataacgagctcaatctaggacgaagagaggagtacgatgttttggacaagagacgtggccgggaccctgagatggggggaaagccgagaaggaagaaccctcaggaaggcctgtacaatgaactgcagaaagataagatggcggaggcctacagtgagattgggatgaaaggcgagcgccggaggggcaaggggcacgatggcctttaccagggtctcagtacagccaccaaggacacctacgacgcccttcacatgcaggccctgccccctcgc

SEQ ID NO: 3575 - DNA, 1464 bp, synthetic construct
  misc_feature 1..1464: note = Synthetic
  source 1..1464: mol_type = other DNA
atggccttaccagtgaccgccttgctcctgccgctggccttgctgctccacgccgccaggccggaggtgcagctgttggagtctgggggaggcttggtacagcctggggggtccctgagactctcctgtgcagcctctggattcatctttagcatttatgatatgggttggttccgccaggctccagggaaggaaagggagttcgtctcagctattagtactaccggtggaagcatttactacgcagactccgtgaagggccggttcaccatctccagagacaattccaagaacacgctgtatctgcaaatgaacagcctgaagccagaggacacggccgtatattactgtaacgccgaccctttagaaagctacgggtactggggccaagggacccaggtcaccgtctcctcaggtggaggcggttcaggcggaggtggctctggcggtggcggatcggaggtgcagctgttggagtctgggggaggcttggtacagcctggggggtccctgagactctcctgtgcagcctctggattcatctttagcatttatgatatgggttggttccgccaggctccagggaaggaaagggagttcgtctcagctattagtactaccggtggaagcatttactacgcagactccgtgaagggccggttcaccatctccagagacaattccaagaacacgctgtatctgcaaatgaacagcctgaagccagaggacacggccgtatattactgtaacgccgaccctttagaaagctacgggtactggggccaagggacccaggtcaccgtctcctcaaccacgacgccagcgccgcggccaccaacaccggcgcccaccatcgcgtcgcagcccctgtccctgcgcccagaggcgtgccggccagcggcggggggcgcagtgcacacgagggggctggacttcgcctgtgatatctacatctgggcgcccttggccgggacttgtggggtccttctcctgtcactggttatcaccctttactgccggagggaccagaggctgccccccgatgcccacaagccccctgggggaggcagtttccggacccccatccaagaggagcaggccgacgcccactccaccctggccaagatcagagtgaagttcagcaggagcgcagacgcccccgcgtaccagcagggccagaaccagctctataacgagctcaatctaggacgaagagaggagtacgatgttttggacaagagacgtggccgggaccctgagatggggggaaagccgagaaggaagaaccctcaggaaggcctgtacaatgaactgcagaaagataagatggcggaggcctacagtgagattgggatgaaaggcgagcgccggaggggcaaggggcacgatggcctttaccagggtctcagtacagccaccaaggacacctacgacgcccttcacatgcaggccctgccccctcgc

SEQ ID NO: 3576 - DNA, 1476 bp, synthetic construct
  misc_feature 1..1476: note = Synthetic
  source 1..1476: mol_type = other DNA
atggccttaccagtgaccgccttgctcctgccgctggccttgctgctccacgccgccaggccggaggtgcagctgttggagtctgggggaggcttggtacagcctggggggtccctgagactctcctgtgcagcctctggatccgtatttagcagctatttcattggctggttccgccaggctccagggaaggagagagagttcgtctcagcagtgattagtagcagtggtagcacatactacgcagactccgtgaagggccggttcaccatctccagagacaattccaagaacacgctgtatctgcaaatgaacagcctgaagcctgaggacacggccgtatattactgtgttgcacgggaggatgttggcgagccctacggctactggggccaagggacccaggtcaccgtctcctcaggtggaggcggttcaggcggaggtggctctggcggtggcggatcggaggtgcagctgttggagtctgggggaggcttggtacagcctggggggtccctgagactctcctgtgcagcctctggatccgtatttagcagctatttcattggctggttccgccaggctccagggaaggagagagagttcgtctcagcagtgattagtagcagtggtagcacatactacgcagactccgtgaagggccggttcaccatctccagagacaattccaagaacacgctgtatctgcaaatgaacagcctgaagcctgaggacacggccgtatattactgtgttgcacgggaggatgttggcgagccctacggctactggggccaagggacccaggtcaccgtctcctcaaccacgacgccagcgccgcggccaccaacaccggcgcccaccatcgcgtcgcagcccctgtccctgcgcccagaggcgtgccggccagcggcggggggcgcagtgcacacgagggggctggacttcgcctgtgatatctacatctgggcgcccttggccgggacttgtggggtccttctcctgtcactggttatcaccctttactgccggagggaccagaggctgccccccgatgcccacaagccccctgggggaggcagtttccggacccccatccaagaggagcaggccgacgcccactccaccctggccaagatcagagtgaagttcagcaggagcgcagacgcccccgcgtaccagcagggccagaaccagctctataacgagctcaatctaggacgaagagaggagtacgatgttttggacaagagacgtggccgggaccctgagatggggggaaagccgagaaggaagaaccctcaggaaggcctgtacaatgaactgcagaaagataagatggcggaggcctacagtgagattgggatgaaaggcgagcgccggaggggcaaggggcacgatggcctttaccagggtctcagtacagccaccaaggacacctacgacgcccttcacatgcaggccctgccccctcgc

SEQ ID NO: 3577 - DNA, 1482 bp, synthetic construct
  misc_feature 1..1482: note = Synthetic
  source 1..1482: mol_type = other DNA
atggccttaccagtgaccgccttgctcctgccgctggccttgctgctccacgccgccaggccggaggtgcagctgctggaaagcggcggcggactggtgcaacctggaggatctctgagactgagctgcgctgcttctggccggggctttaccagctactacatgggctggttcagacaggcccctggcaaggaacgggaattcgtgtccgccgtgatcttcccagagggctaccggtactacgccgacagcgtgaaaggcagattcaccatcagcagagataatagcaagaacaccctgtacctgcagatgaacagcctcaagcccgaggacacagccgtctactattgtgccaagtacacaggcttcggcgaggacgcctacagatactggggccagggcacccaggtgaccgtgtccagcggtggcggtggctcgggcggtggtgggtcgggtggcggcggatctgaggtgcagctgctggagagcggaggtggtctggtgcagccggggggctccttgcgcctgtcatgcgctgcttccgggcgaggttttaccagctactacatgggctggttccgccaggcccccggcaaggagcgcgagttcgtcagcgcagtgatttttcccgagggctacaggtattacgcggacagtgtgaaaggccgcttcaccatctcgcgggacaactccaagaacacgctttacctgcagatgaattccctcaagcctgaagatacagccgtgtactactgtgccaagtacaccggcttcggagaggacgcgtaccgttattggggccaaggcacccaggtcactgtttcttctaccacgacgccagcgccgcggccaccaacaccggcgcccaccatcgcgtcgcagcccctgtccctgcgcccagaggcgtgccggccagcggcggggggcgcagtgcacacgagggggctggacttcgcctgtgatatctacatctgggcgcccttggccgggacttgtggggtccttctcctgtcactggttatcaccctttactgccggagggaccagaggctgccccccgatgcccacaagccccctgggggaggcagtttccggacccccatccaagaggagcaggccgacgcccactccaccctggccaagatcagagtgaagttcagcaggagcgcagacgcccccgcgtaccagcagggccagaaccagctctataacgagctcaatctaggacgaagagaggagtacgatgttttggacaagagacgtggccgggaccctgagatggggggaaagccgagaaggaagaaccctcaggaaggcctgtacaatgaactgcagaaagataagatggcggaggcctacagtgagattgggatgaaaggcgagcgccggaggggcaaggggcacgatggcctttaccagggtctcagtacagccaccaaggacacctacgacgcccttcacatgcaggccctgccccctcgc

SEQ ID NO: 3578 - DNA, 1476 bp, synthetic construct
  misc_feature 1..1476: note = Synthetic
  source 1..1476: mol_type = other DNA
atggccttaccagtgaccgccttgctcctgccgctggccttgctgctccacgccgccaggccggaggtgcagctgctggaatctggcggaggcctggtgcaacctggaggatctctgagactgagctgtgccgcttctggcctcacattcagcatccacacagttggctggtttagacaggcccctggcaaagagcgggaattcgtgtccgccgccctgggcagcggcggacgcccatactatagagatagcgtgaagggcagattcaccatcagccgggacaatagcaagaacaccctgtacctgcagatgaacagcctgaagcccgaggacaccgccgtgtactactgctacgtggacgtgggcaccggcctgtactacggctactggggccagggcacacaggtgaccgtctccagcggtggcggtggctcgggcggtggtgggtcgggtggcggcggatctgaggtgcagctgctggagagcggaggcggtctcgtgcagccgggagggagtctacgcctgtcgtgtgccgcaagcggtctcacgttttcaattcacaccgtgggctggttccgccaggccccaggcaaggagcgcgagttcgtcagcgcggctttgggctccggtgggcgtccctattacagggattctgtgaagggccgcttcaccatctctcgggacaactccaaaaacactctgtacctgcagatgaattccctgaagcctgaagacaccgccgtgtactactgctacgtggacgtagggactggcctttactacggctattggggccaaggcacccaggtcacagtttcgtccaccacgacgccagcgccgcggccaccaacaccggcgcccaccatcgcgtcgcagcccctgtccctgcgcccagaggcgtgccggccagcggcggggggcgcagtgcacacgagggggctggacttcgcctgtgatatctacatctgggcgcccttggccgggacttgtggggtccttctcctgtcactggttatcaccctttactgccggagggaccagaggctgccccccgatgcccacaagccccctgggggaggcagtttccggacccccatccaagaggagcaggccgacgcccactccaccctggccaagatcagagtgaagttcagcaggagcgcagacgcccccgcgtaccagcagggccagaaccagctctataacgagctcaatctaggacgaagagaggagtacgatgttttggacaagagacgtggccgggaccctgagatggggggaaagccgagaaggaagaaccctcaggaaggcctgtacaatgaactgcagaaagataagatggcggaggcctacagtgagattgggatgaaaggcgagcgccggaggggcaaggggcacgatggcctttaccagggtctcagtacagccaccaaggacacctacgacgcccttcacatgcaggccctgccccctcgc

SEQ ID NO: 3579 - DNA, 1494 bp, synthetic construct
  misc_feature 1..1494: note = Synthetic
  source 1..1494: mol_type = other DNA
atggccttaccagtgaccgccttgctcctgccgctggccttgctgctccacgccgccaggccggaggtgcagctgctggaaagcggcggaggcctggtccaacctggaggaagcctgagactgtcttgtgccgccagcggcagaatcttcagctcttattttatgggctggttccggcaggcccctggcaaggaaagagagttcgtgtccgcccacatcagcagcgagggctctacatactaccgggacagcgtgaaaggcaggttcaccatctccagagataatagcaagaacaccctgtacctgcagatgaacagcctcaagcccgaggacaccgccgtgtactactgcgctgctagagaatacgccgacacccagcggggcgagtacgcctactggggccagggcacacaggtgaccgtgtccagcggtggcggtggctcgggcggtggtgggtcgggtggcggcggatctgaggtgcagctgctggagagcggcggaggtttggtgcagccggggggttctcttcgcctgagttgcgccgctagcggacgcattttttcaagctatttcatgggctggttccgccaggcccccggcaaggagcgagagttcgtcagcgcgcacatctcttccgagggctccacctactacagggattctgtgaagggccgcttcaccatctcgcgggacaactccaagaacacgctgtacctgcagatgaattccctcaaacctgaagacactgccgtgtactactgtgccgctcgcgagtacgcggacacccaacgtggggagtacgcatattggggccagggcacccaggtcacagtttcgtccaccacgacgccagcgccgcggccaccaacaccggcgcccaccatcgcgtcgcagcccctgtccctgcgcccagaggcgtgccggccagcggcggggggcgcagtgcacacgagggggctggacttcgcctgtgatatctacatctgggcgcccttggccgggacttgtggggtccttctcctgtcactggttatcaccctttactgccggagggaccagaggctgccccccgatgcccacaagccccctgggggaggcagtttccggacccccatccaagaggagcaggccgacgcccactccaccctggccaagatcagagtgaagttcagcaggagcgcagacgcccccgcgtaccagcagggccagaaccagctctataacgagctcaatctaggacgaagagaggagtacgatgttttggacaagagacgtggccgggaccctgagatggggggaaagccgagaaggaagaaccctcaggaaggcctgtacaatgaactgcagaaagataagatggcggaggcctacagtgagattgggatgaaaggcgagcgccggaggggcaaggggcacgatggcctttaccagggtctcagtacagccaccaaggacacctacgacgcccttcacatgcaggccctgccccctcgc

SEQ ID NO: 3580 - DNA, 1464 bp, synthetic construct
  misc_feature 1..1464: note = Synthetic
  source 1..1464: mol_type = other DNA
atggccttaccagtgaccgccttgctcctgccgctggccttgctgctccacgccgccaggccggaggtgcagctgctggaaagcggaggcggcctggttcaacctggaggatctctgagactgagctgcgccgctagcggctctatcgtgtccagctacgccatgggctggtttagacaggcccctggcaaagagcgggaattcgtgtcctccgccatcggcaagggcggcgtcacaatctacgccgacagcgtgaagggcagattcaccatcagcagagataatagcaagaacaccctgtacctccagatgaacagcctgaagcccgaggacaccgccgtgtactattgtgctacagatgagagcacctaccgggactactggggccagggcacacaggtgaccgtgtctagcggtggcggtggctcgggcggtggtgggtcgggtggcggcggatctgaggtgcagctgctggagagcggagggggactggtgcagccgggcggctcccttcgtttgtcatgcgcagcttccggttctatcgtgtccagctacgccatgggctggttccgccaggcccccggcaaggagcgcgagttcgtctcttccgccatcggtaaaggtggggttacaatttacgcggacagcgtgaagggccgctttaccatctctcgggacaactccaagaacacgctgtacctgcagatgaattccctcaagcctgaagacaccgccgtgtactactgtgccaccgacgagagtacttacagggattattggggccaaggcacccaggtcactgtatcgtcgaccacgacgccagcgccgcggccaccaacaccggcgcccaccatcgcgtcgcagcccctgtccctgcgcccagaggcgtgccggccagcggcggggggcgcagtgcacacgagggggctggacttcgcctgtgatatctacatctgggcgcccttggccgggacttgtggggtccttctcctgtcactggttatcaccctttactgccggagggaccagaggctgccccccgatgcccacaagccccctgggggaggcagtttccggacccccatccaagaggagcaggccgacgcccactccaccctggccaagatcagagtgaagttcagcaggagcgcagacgcccccgcgtaccagcagggccagaaccagctctataacgagctcaatctaggacgaagagaggagtacgatgttttggacaagagacgtggccgggaccctgagatggggggaaagccgagaaggaagaaccctcaggaaggcctgtacaatgaactgcagaaagataagatggcggaggcctacagtgagattgggatgaaaggcgagcgccggaggggcaaggggcacgatggcctttaccagggtctcagtacagccaccaaggacacctacgacgcccttcacatgcaggccctgccccctcgc

SEQ ID NO: 3581 - DNA, 1458 bp, synthetic construct
  misc_feature 1..1458: note = Synthetic
  source 1..1458: mol_type = other DNA
atggccttaccagtgaccgccttgctcctgccgctggccttgctgctccacgccgccaggccggaggtgcagctgctggaaagcggcggaggcctggtgcaacctggcggcagcctgagactgagctgcgctgcttctggatctctgtttcaggtcgagcacatcggctggttcagacaggcccctggcaaggaacgggacttcgtgtccgcccaggttacaggcggaggctacacctactacgccgacagcgtgaaaggcagattcaccatcagcagagataatagcaagaacaccctgtacctgcagatgaacagcctgaagcccgaggacaccgccgtgtactattgttacgtgcggctcgtggaagaggcctactggggccagggcacacaggtgaccgtgtccagcggtggcggtggctcgggcggtggtgggtcgggtggcggcggatctgaggtgcagctgctggagagcggtggagggctggtgcagccggggggctccctccgcctgagttgtgccgcttccggttctctgtttcaggtggagcacatcggttggttccgccaggcccccggcaaggagcgtgatttcgtctcggcacaagtcactggaggcggctacacctattacgcggacagcgtgaagggccgcttcaccatctctcgggacaactccaagaacacgctttacctgcagatgaattcgctaaaacctgaagacaccgccgtatactactgctacgtgaggttggtggaggaggcttattggggccagggcacccaggttacagtctcctcaaccacgacgccagcgccgcggccaccaacaccggcgcccaccatcgcgtcgcagcccctgtccctgcgcccagaggcgtgccggccagcggcggggggcgcagtgcacacgagggggctggacttcgcctgtgatatctacatctgggcgcccttggccgggacttgtggggtccttctcctgtcactggttatcaccctttactgccggagggaccagaggctgccccccgatgcccacaagccccctgggggaggcagtttccggacccccatccaagaggagcaggccgacgcccactccaccctggccaagatcagagtgaagttcagcaggagcgcagacgcccccgcgtaccagcagggccagaaccagctctataacgagctcaatctaggacgaagagaggagtacgatgttttggacaagagacgtggccgggaccctgagatggggggaaagccgagaaggaagaaccctcaggaaggcctgtacaatgaactgcagaaagataagatggcggaggcctacagtgagattgggatgaaaggcgagcgccggaggggcaaggggcacgatggcctttaccagggtctcagtacagccaccaaggacacctacgacgcccttcacatgcaggccctgccccctcgc

SEQ ID NO: 3582 - DNA, 1494 bp, synthetic construct
  misc_feature 1..1494: note = Synthetic
  source 1..1494: mol_type = other DNA
atggccttaccagtgaccgccttgctcctgccgctggccttgctgctccacgccgccaggccggaggtgcagctgctggaaagcggcggcggactggtgcaacctggcggatctctgcggttgtcttgtgctgccagcggaacaaccttcgcctctagctttatgggctggttccggcaggcccctggcaaggaaagagagttcgtgtccgccatcgtgttcccaggcggcagcacatactatgccgacagcgtgaagggcagattcaccatcagcagagataattcaaagaacaccctgtacctgcagatgaacagcctgaaacccgaggacaccgccgtgtactactgcgccgctagacggtacgagctggtcgacagactggaatacgcctactggggccagggcacacaggtgaccgtgtccagcggtggcggtggctcgggcggtggtgggtcgggtggcggcggatctgaggtgcagctgctggaatctggaggcgggcttgtacagccgggcggttctctccgtctatcatgcgccgcgtcggggactacatttgcttccagttttatgggctggttccgccaggcccccggcaaggagcgggagttcgtcagcgccatcgtgttccctggtggctccacctactacgcggacagcgtgaagggccgattcaccatctctagggacaactccaaaaacacgctgtacctgcagatgaatagcttgaagcccgaggacaccgccgtttattactgtgctgctcgccgctacgagctggtggatcgcctggagtacgcatattggggccaaggcacccaggtcaccgtgtcgtccaccacgacgccagcgccgcggccaccaacaccggcgcccaccatcgcgtcgcagcccctgtccctgcgcccagaggcgtgccggccagcggcggggggcgcagtgcacacgagggggctggacttcgcctgtgatatctacatctgggcgcccttggccgggacttgtggggtccttctcctgtcactggttatcaccctttactgccggagggaccagaggctgccccccgatgcccacaagccccctgggggaggcagtttccggacccccatccaagaggagcaggccgacgcccactccaccctggccaagatcagagtgaagttcagcaggagcgcagacgcccccgcgtaccagcagggccagaaccagctctataacgagctcaatctaggacgaagagaggagtacgatgttttggacaagagacgtggccgggaccctgagatggggggaaagccgagaaggaagaaccctcaggaaggcctgtacaatgaactgcagaaagataagatggcggaggcctacagtgagattgggatgaaaggcgagcgccggaggggcaaggggcacgatggcctttaccagggtctcagtacagccaccaaggacacctacgacgcccttcacatgcaggccctgccccctcgc

SEQ ID NO: 3583 - DNA, 1464 bp, synthetic construct
  misc_feature 1..1464: note = Synthetic
  source 1..1464: mol_type = other DNA
atggccttaccagtgaccgccttgctcctgccgctggccttgctgctccacgccgccaggccggaggtgcagctgctggaaagcggcggcggactggttcagcctggaggaagcctgagactgtcttgtgccgcctctggctctgtgttcagcagctttaccatcggctggttccggcaggcccccggcaaggagagagaattcgtgtccgccatcgtgacaagcaccggcagcacatactacgctgatagcgtcaagggcagattcacaatcagcagagacaatagcaaaaacaccctgtacctgcaaatgaactccctcaagcctgaggacaccgccgtgtactactgcaacgtgcggacccaggaggactactactattggggccagggcacccaggtgaccgtgtccagcggtggcggtggctcgggcggtggtgggtcgggtggcggcggatctgaggtgcagctgctggagagcggaggtggactggtgcagccgggggggtctttgaggctgagttgtgctgcttctggctccgtgttttcatccttcaccatcggttggttccgccaggcccccggcaaggagcgggagttcgtcagcgcaattgttacttcgaccggctccacttactacgcggacagcgtaaagggccgcttcacaatctcgcgtgacaactccaagaacacgctttacctgcagatgaattccctcaaacctgaagacaccgccgtgtactactgcaacgtgcgcacccaggaggattattactattggggccaaggcacccaggtcaccgtgagctctaccacgacgccagcgccgcggccaccaacaccggcgcccaccatcgcgtcgcagcccctgtccctgcgcccagaggcgtgccggccagcggcggggggcgcagtgcacacgagggggctggacttcgcctgtgatatctacatctgggcgcccttggccgggacttgtggggtccttctcctgtcactggttatcaccctttactgccggagggaccagaggctgccccccgatgcccacaagccccctgggggaggcagtttccggacccccatccaagaggagcaggccgacgcccactccaccctggccaagatcagagtgaagttcagcaggagcgcagacgcccccgcgtaccagcagggccagaaccagctctataacgagctcaatctaggacgaagagaggagtacgatgttttggacaagagacgtggccgggaccctgagatggggggaaagccgagaaggaagaaccctcaggaaggcctgtacaatgaactgcagaaagataagatggcggaggcctacagtgagattgggatgaaaggcgagcgccggaggggcaaggggcacgatggcctttaccagggtctcagtacagccaccaaggacacctacgacgcccttcacatgcaggccctgccccctcgc

SEQ ID NO: 3584 - DNA, 1494 bp, synthetic construct
  misc_feature 1..1494: note = Synthetic
  source 1..1494: mol_type = other DNA
atggccttaccagtgaccgccttgctcctgccgctggccttgctgctccacgccgccaggccggaggtgcagctgctggaaagcggaggaggcctggtccagccaggcggctccctgagactgagctgtgccgcttctggcagcatcttcggcagccactttatgggctggttccggcaggcccctggcaaagagcgggaattcgtgtccgccgctgtgaccagcggcggatctacatattacgccgacagcgtgaagggcagattcaccatcagcagagataattctaagaacaccctgtacctgcagatgaacagcctcaagcccgaggacaccgccgtgtactactgcgccgccagaacctaccagagcacctaccaacctgagtacgcctactggggccagggcacacaggtgacagtgtccagcggtggcggtggctcgggcggtggtgggtcgggtggcggcggatctgaggtgcagctgctggagagcggaggtgggctggtgcagccggggggttctttgcgcctgtcatgcgccgcatctggctccatcttcggaagtcactttatgggctggttccgccaggcccccggcaaggagagggagttcgtctccgccgccgtgacctccggtggctccacttattacgcggacagcgttaagggccgcttcaccatttctcgtgacaactccaagaacacgctttacctgcagatgaattccctcaaacctgaagatacagccgtgtactactgtgctgctcggacctaccagagcacttaccaaccagagtacgcctattggggccagggcacccaggtcaccgtgtcgtcgaccacgacgccagcgccgcggccaccaacaccggcgcccaccatcgcgtcgcagcccctgtccctgcgcccagaggcgtgccggccagcggcggggggcgcagtgcacacgagggggctggacttcgcctgtgatatctacatctgggcgcccttggccgggacttgtggggtccttctcctgtcactggttatcaccctttactgccggagggaccagaggctgccccccgatgcccacaagccccctgggggaggcagtttccggacccccatccaagaggagcaggccgacgcccactccaccctggccaagatcagagtgaagttcagcaggagcgcagacgcccccgcgtaccagcagggccagaaccagctctataacgagctcaatctaggacgaagagaggagtacgatgttttggacaagagacgtggccgggaccctgagatggggggaaagccgagaaggaagaaccctcaggaaggcctgtacaatgaactgcagaaagataagatggcggaggcctacagtgagattgggatgaaaggcgagcgccggaggggcaaggggcacgatggcctttaccagggtctcagtacagccaccaaggacacctacgacgcccttcacatgcaggccctgccccctcgc

SEQ ID NO: 3585 - DNA, 1506 bp, synthetic construct
  misc_feature 1..1506: note = Synthetic
  source 1..1506: mol_type = other DNA
atggccttaccagtgaccgccttgctcctgccgctggccttgctgctccacgccgccaggccggaggtgcagctgctggaaagcggcggaggcctggtccaacctggcggcagcctgagactgtcttgtgctgcttccggatctatcttcagcatcctggacatcggctggttccgccaggcccctggcaaggaacgggaattcgtgtccgcctatatcagcagcggcggatctacatactacagcgacagcgtgaaaggcagattcaccattagcagagataatagcaagaacaccctgtacctgcagatgaacagcctcaagcccgaggacaccgccgtgtactactgcgtggccacaatctttggcgatagaaccgagggccaggagcggtacgccttctggggccagggcacacaggtgaccgtgtccagcggtggcggtggctcgggcggtggtgggtcgggtggcggcggatctgaggtgcagctgctggagagcggaggagggttggtgcagccgggcgggagccttcgcctgtcatgcgccgcttctggctccattttttctatcctggacatcggttggttccgccaggcccccggcaaggagagggagttcgtcagcgcctacatctcgagcggtggctcgacctattactccgactccgtgaagggccgcttcaccatttctcgggacaactccaagaacacgctgtacctacagatgaattccctcaaacctgaagacactgcagtgtactactgcgtggctaccatctttggtgatcgtactgagggccaggagcgttacgcgttctggggccaaggcacccaggtcacagtttctagtaccacgacgccagcgccgcggccaccaacaccggcgcccaccatcgcgtcgcagcccctgtccctgcgcccagaggcgtgccggccagcggcggggggcgcagtgcacacgagggggctggacttcgcctgtgatatctacatctgggcgcccttggccgggacttgtggggtccttctcctgtcactggttatcaccctttactgccggagggaccagaggctgccccccgatgcccacaagccccctgggggaggcagtttccggacccccatccaagaggagcaggccgacgcccactccaccctggccaagatcagagtgaagttcagcaggagcgcagacgcccccgcgtaccagcagggccagaaccagctctataacgagctcaatctaggacgaagagaggagtacgatgttttggacaagagacgtggccgggaccctgagatggggggaaagccgagaaggaagaaccctcaggaaggcctgtacaatgaactgcagaaagataagatggcggaggcctacagtgagattgggatgaaaggcgagcgccggaggggcaaggggcacgatggcctttaccagggtctcagtacagccaccaaggacacctacgacgcccttcacatgcaggccctgccccctcgc

SEQ ID NO: 3586 - DNA, 1494 bp, synthetic construct
  misc_feature 1..1494: note = Synthetic
  source 1..1494: mol_type = other DNA
atggccttaccagtgaccgccttgctcctgccgctggccttgctgctccacgccgccaggccggaggtgcagctgctggaaagcggaggcggcctggtccaaccaggcggatctctgcggctgagctgtgccgccagcggctctacaaccagcagctacttcatgggctggtttcggcaggcccctggcaaggaaagagagttcgtgtccgccatcatcacctcctccggcagcccctactacgccgacagcgtgaagggcagattcaccatcagcagagataatagcaagaacaccctgtacctccagatgaacagcctgaaacctgaggatacagccgtgtactactgcgctgctagacggtacggctctagagagacagacgactacggatattggggccagggcacccaggtgaccgtgtctagcggtggcggtggctcgggcggtggtgggtcgggtggcggcggatctgaagtgcagctgctggagagcggcggcggactggtgcagccaggaggttccttgcgcctttcatgcgctgcctctggttccacaacttcgagctactttatggggtggttcagacaggccccggggaaggagagggagttcgtcagcgcaattatcacctcctctggctccccctattacgcggactcggtgaaaggccggttcaccatctctcgcgacaactccaagaacacgctctacctgcagatgaattctctgaagcctgaggacaccgccgtgtactactgtgccgctcgtcgctacggctcccgcgagactgatgactacggttattggggccaaggcacccaggtcaccgttagcagtaccacgacgccagcgccgcggccaccaacaccggcgcccaccatcgcgtcgcagcccctgtccctgcgcccagaggcgtgccggccagcggcggggggcgcagtgcacacgagggggctggacttcgcctgtgatatctacatctgggcgcccttggccgggacttgtggggtccttctcctgtcactggttatcaccctttactgccggagggaccagaggctgccccccgatgcccacaagccccctgggggaggcagtttccggacccccatccaagaggagcaggccgacgcccactccaccctggccaagatcagagtgaagttcagcaggagcgcagacgcccccgcgtaccagcagggccagaaccagctctataacgagctcaatctaggacgaagagaggagtacgatgttttggacaagagacgtggccgggaccctgagatggggggaaagccgagaaggaagaaccctcaggaaggcctgtacaatgaactgcagaaagataagatggcggaggcctacagtgagattgggatgaaaggcgagcgccggaggggcaaggggcacgatggcctttaccagggtctcagtacagccaccaaggacacctacgacgcccttcacatgcaggccctgccccctcgc

SEQ ID NO: 3587 - DNA, 1500 bp, synthetic construct
  misc_feature 1..1500: note = Synthetic
  source 1..1500: mol_type = other DNA
atggccttaccagtgaccgccttgctcctgccgctggccttgctgctccacgccgccaggccggaggtgcagctgctggaaagcggcggcggcctggtgcaacctggaggctctctgcggctgagctgcgctgcttctggctccgtctttagcagctacagcatgtggttcagacaggcccctggcaaggaaagagagttcgtgtccgccattatcaccagcggcggcagcacctactacgccgatagcgtgaaaggcagattcaccatcagccgggacaatagcaagaacaccctgtacctgcagatgaacagcctcaagcccgaggacaccgccgtgtactattgtgtggccgtgtacggcatcggcacaggccagtacatcggaacatacgacatctggggacagggcacacaggtgaccgtgtctagcggtggcggtggctcgggcggtggtgggtcgggtggcggcggatctgaggtgcagctgctggagagcgggggtggtctggtgcagccgggcgggtcgttgcgtctgtcatgcgccgcttctggctccgtattttctagctactccatgtggttccgccaggcccccggcaaggagcgcgagttcgtctccgccatcatcaccagcggaggctccacttactacgcggacagtgtgaagggccgcttcaccatttctcgggacaactccaagaacacgctttacctgcagatgaattccctcaaacctgaagatactgccgtttattactgcgtggcagtgtacggcatcggtacaggacaatatattgggacctacgacatctggggccagggcacccaggtcaccgtgtcgtccaccacgacgccagcgccgcggccaccaacaccggcgcccaccatcgcgtcgcagcccctgtccctgcgcccagaggcgtgccggccagcggcggggggcgcagtgcacacgagggggctggacttcgcctgtgatatctacatctgggcgcccttggccgggacttgtggggtccttctcctgtcactggttatcaccctttactgccggagggaccagaggctgccccccgatgcccacaagccccctgggggaggcagtttccggacccccatccaagaggagcaggccgacgcccactccaccctggccaagatcagagtgaagttcagcaggagcgcagacgcccccgcgtaccagcagggccagaaccagctctataacgagctcaatctaggacgaagagaggagtacgatgttttggacaagagacgtggccgggaccctgagatggggggaaagccgagaaggaagaaccctcaggaaggcctgtacaatgaactgcagaaagataagatggcggaggcctacagtgagattgggatgaaaggcgagcgccggaggggcaaggggcacgatggcctttaccagggtctcagtacagccaccaaggacacctacgacgcccttcacatgcaggccctgccccctcgc

SEQ ID NO: 3588 - DNA, 1488 bp, synthetic construct
  misc_feature 1..1488: note = Synthetic
  source 1..1488: mol_type = other DNA
atggccttaccagtgaccgccttgctcctgccgctggccttgctgctccacgccgccaggccggaggtgcagctgctggaaagcggaggaggcctggtccaacctggaggatctctgcggctgagctgcgccgcttctggcagcctgctcagcatctacgacatgggctggtttagacaggcccctggcaaggaacgggaattcgtgtccgccagaatcggcaaaggcggctctacatactacgccgacagcgtgaagggcagattcaccatcagcagagataatagcaagaacaccctgtacctgcagatgaacagcctgaagcccgaggacacagccgtgtactattgtgctgtgctggtgggcgagggcgagagctacggctaccactactggggccagggcacccaggtgaccgtgtccagcggtggcggtggctcgggcggtggtgggtcgggtggcggcggatctgaggtgcaactgctggagagtgggggtggattggtgcagccgggtggctccctccgcctgtcatgcgccgcttctggctcccttctcagcatttacgacatggggtggttccgccaggcccccggcaaggagcgggagttcgtctccgcccgcatcggtaaaggaggctcgacctactacgcggactccgtgaagggcaggtttaccatctctcgtgacaactccaagaacacgctatacctgcagatgaattcgctgaagcctgaagatactgcagtttattactgtgccgtgctggtaggggagggcgagagctacggctaccactattggggccagggcacccaggtcaccgtgtcctctaccacgacgccagcgccgcggccaccaacaccggcgcccaccatcgcgtcgcagcccctgtccctgcgcccagaggcgtgccggccagcggcggggggcgcagtgcacacgagggggctggacttcgcctgtgatatctacatctgggcgcccttggccgggacttgtggggtccttctcctgtcactggttatcaccctttactgccggagggaccagaggctgccccccgatgcccacaagccccctgggggaggcagtttccggacccccatccaagaggagcaggccgacgcccactccaccctggccaagatcagagtgaagttcagcaggagcgcagacgcccccgcgtaccagcagggccagaaccagctctataacgagctcaatctaggacgaagagaggagtacgatgttttggacaagagacgtggccgggaccctgagatggggggaaagccgagaaggaagaaccctcaggaaggcctgtacaatgaactgcagaaagataagatggcggaggcctacagtgagattgggatgaaaggcgagcgccggaggggcaaggggcacgatggcctttaccagggtctcagtacagccaccaaggacacctacgacgcccttcacatgcaggccctgccccctcgc

SEQ ID NO: 3589 - DNA, 1500 bp, synthetic construct
  misc_feature 1..1500: note = Synthetic
  source 1..1500: mol_type = other DNA
atggccttaccagtgaccgccttgctcctgccgctggccttgctgctccacgccgccaggccggaggtgcagctgctggaaagcggcggcggactggtccaacctggaggcagcctgagactgtcttgtgccgccagcggcatcggcctctccatctactttatgggctggttccggcaggcccctggcaaggaacgggaattcgtgtccgccatcatcagcagcagcggatctacctactacgccgacagcgtgaaaggcagattcaccatctctagagataatagcaagaacaccctgtacctgcagatgaacagcctgaagcccgaggacaccgccgtgtactactgcgctgctagaaccggctacagcgagtacgagcaggaggactacggctattggggccagggcacacaggtgacagtgtccagcggtggcggtggctcgggcggtggtgggtcgggtggcggcggatctgaggtgcagctgctggagagcggaggtgggctggtgcagccgggaggttctctacggttgtcatgcgccgcgtctggcatcggtcttagcatttactttatgggctggttccgccaggcccccgggaaggagagggagttcgtctcggccatcatctcttcttccggctccacttattacgcggacagcgttaagggccgcttcaccatctcgcgtgacaactccaagaacacgctgtacctgcagatgaattccctcaaacctgaagatacagcagtgtactactgtgctgctcgcaccggctactccgagtacgagcaggaggactacggctattggggccaaggcacccaggtcaccgtgtccagtaccacgacgccagcgccgcggccaccaacaccggcgcccaccatcgcgtcgcagcccctgtccctgcgcccagaggcgtgccggccagcggcggggggcgcagtgcacacgagggggctggacttcgcctgtgatatctacatctgggcgcccttggccgggacttgtggggtccttctcctgtcactggttatcaccctttactgccggagggaccagaggctgccccccgatgcccacaagccccctgggggaggcagtttccggacccccatccaagaggagcaggccgacgcccactccaccctggccaagatcagagtgaagttcagcaggagcgcagacgcccccgcgtaccagcagggccagaaccagctctataacgagctcaatctaggacgaagagaggagtacgatgttttggacaagagacgtggccgggaccctgagatggggggaaagccgagaaggaagaaccctcaggaaggcctgtacaatgaactgcagaaagataagatggcggaggcctacagtgagattgggatgaaaggcgagcgccggaggggcaaggggcacgatggcctttaccagggtctcagtacagccaccaaggacacctacgacgcccttcacatgcaggccctgccccctcgc

SEQ ID NO: 3590 - DNA, 1494 bp, synthetic construct
  misc_feature 1..1494: note = Synthetic
  source 1..1494: mol_type = other DNA
atggccttaccagtgaccgccttgctcctgccgctggccttgctgctccacgccgccaggccggaggtgcagctgctggaaagcggcggaggcctggtgcaacctggaggatctctcagactgagctgcgccgcttctggcagcatcttcagcagctccttcatcggctggttcagacaggcccctggcaaagagcgggaattcgtgtccgccgtgatcgcctcttctggcagcacctactacgccgacagcgtgaagggccggtttaccatcagcagagataatagcaagaacaccctgtacctgcagatgaacagcctgaagcccgaggacaccgccgtgtactattgtgctggcagattcggccagggcggcggcacagtcgagtacggctactggggccagggaacacaggtgaccgtgtccagcggtggcggtggctcgggcggtggtgggtcgggtggcggcggatctgaggtgcaactgctggagagcggcggcgggcttgtgcagccggggggctccctccggctgtcatgcgcggcctctggctccatcttcagcagctcctttatcggttggttccgccaggcccccggcaaggagcgcgagttcgtctctgcagtaattgcttcctctggttcgacttattacgcggacagtgttaaaggccgcttcaccatcagcagggacaactccaagaacacgctgtacttgcagatgaattccctgaagcctgaagatacagccgtgtactactgtgctggccgcttcggacagggcggtggtaccgtggagtacggctactggggccaggggacccaggtgaccgtctcttcgaccacgacgccagcgccgcggccaccaacaccggcgcccaccatcgcgtcgcagcccctgtccctgcgcccagaggcgtgccggccagcggcggggggcgcagtgcacacgagggggctggacttcgcctgtgatatctacatctgggcgcccttggccgggacttgtggggtccttctcctgtcactggttatcaccctttactgccggagggaccagaggctgccccccgatgcccacaagccccctgggggaggcagtttccggacccccatccaagaggagcaggccgacgcccactccaccctggccaagatcagagtgaagttcagcaggagcgcagacgcccccgcgtaccagcagggccagaaccagctctataacgagctcaatctaggacgaagagaggagtacgatgttttggacaagagacgtggccgggaccctgagatggggggaaagccgagaaggaagaaccctcaggaaggcctgtacaatgaactgcagaaagataagatggcggaggcctacagtgagattgggatgaaaggcgagcgccggaggggcaaggggcacgatggcctttaccagggtctcagtacagccaccaaggacacctacgacgcccttcacatgcaggccctgccccctcgc

SEQ ID NO: 3591 - DNA, 1494 bp, synthetic construct
  misc_feature 1..1494: note = Synthetic
  source 1..1494: mol_type = other DNA
atggccttaccagtgaccgccttgctcctgccgctggccttgctgctccacgccgccaggccggaagtgcagctgctggaaagcggcggaggcctggtccaacctggaggatctctcagactgagctgtgccgccagcggcagagtgttcagcttctacttcatgggctggttccggcaggcccctggcaaagagcgggaatttgtgtccggcgtgatcggcaagacaggctctacatactacaccgacagcgtgaagggcagattcaccatcagcagagataatagcaagaacaccctgtacctgcagatgaacagcctgaagcccgaggacaccgccgtgtactactgcgctgcttctgagtaccagggcaccggctacggcgagtttgcctattggggccagggaacacaggtgaccgtgtccagcggtggcggtggctcgggcggtggtgggtcgggtggcggcggatctgaggtacagctgctggagagcgggggaggactggtgcagccgggcggcagccttaggctgtcttgcgcagcttccggtcgcgtgttctccttttatttcatggggtggttccgccaggcccctggtaaggagcgcgagttcgtctccggtgttattggcaagaccggctccacttactacactgattctgtgaagggccgcttcaccatcagccgggacaactccaaaaacacgttgtacctgcagatgaattctctcaagcccgaggacaccgccgtgtactactgtgctgccagtgagtaccaggggacaggctacggcgaatttgcctattggggccagggcacccaagtcaccgtgtcgtcgaccacgacgccagcgccgcggccaccaacaccggcgcccaccatcgcgtcgcagcccctgtccctgcgcccagaggcgtgccggccagcggcggggggcgcagtgcacacgagggggctggacttcgcctgtgatatctacatctgggcgcccttggccgggacttgtggggtccttctcctgtcactggttatcaccctttactgccggagggaccagaggctgccccccgatgcccacaagccccctgggggaggcagtttccggacccccatccaagaggagcaggccgacgcccactccaccctggccaagatcagagtgaagttcagcaggagcgcagacgcccccgcgtaccagcagggccagaaccagctctataacgagctcaatctaggacgaagagaggagtacgatgttttggacaagagacgtggccgggaccctgagatggggggaaagccgagaaggaagaaccctcaggaaggcctgtacaatgaactgcagaaagataagatggcggaggcctacagtgagattgggatgaaaggcgagcgccggaggggcaaggggcacgatggcctttaccagggtctcagtacagccaccaaggacacctacgacgcccttcacatgcaggccctgccccctcgc

SEQ ID NO: 3592 - DNA, 1458 bp, synthetic construct
  misc_feature 1..1458: note = Synthetic
  source 1..1458: mol_type = other DNA
atggccttaccagtgaccgccttgctcctgccgctggccttgctgctccacgccgccaggccggaggtgcagctgctggaaagcggaggcggcctggtgcaacctggcggatctctgagactgagctgtgctgcttctggcagcctgttcgaggttgagcacatcggctggtttagacaggcccctggaaaagagcgggaattcgtgtccgcccaggtgaccggcggcggctacacctactatgccgacagcgtgaagggcagattcaccatcagcagagataatagcaagaacaccctgtacctgcagatgaacagcctcaagcccgaggacaccgccgtgtactactgctacgtgcggctggtcgaggaagcctactggggccagggcacacaggtgacagtgtccagcggtggcggtggctcgggcggtggtgggtcgggtggcggcggatctgaggtgcagctgctggagagcggaggcggtctcgtccaacctggcggctcccttcgtttgtcatgcgccgcttccggttctctgtttgaggtggagcacatcggttggttccgccaggcccccgggaaggagcgggagttcgtctccgcccaggtcacaggcgggggctacacctattacgcggacagtgtaaaaggacgcttcaccatttctagggacaactccaagaacacgctgtacctgcagatgaattccctcaagccggaagatactgcagtgtactactgttacgtgcgcctggtggaggaggcctattggggccagggcacccaggttaccgtgagctcgaccacgacgccagcgccgcggccaccaacaccggcgcccaccatcgcgtcgcagcccctgtccctgcgcccagaggcgtgccggccagcggcggggggcgcagtgcacacgagggggctggacttcgcctgtgatatctacatctgggcgcccttggccgggacttgtggggtccttctcctgtcactggttatcaccctttactgccggagggaccagaggctgccccccgatgcccacaagccccctgggggaggcagtttccggacccccatccaagaggagcaggccgacgcccactccaccctggccaagatcagagtgaagttcagcaggagcgcagacgcccccgcgtaccagcagggccagaaccagctctataacgagctcaatctaggacgaagagaggagtacgatgttttggacaagagacgtggccgggaccctgagatggggggaaagccgagaaggaagaaccctcaggaaggcctgtacaatgaactgcagaaagataagatggcggaggcctacagtgagattgggatgaaaggcgagcgccggaggggcaaggggcacgatggcctttaccagggtctcagtacagccaccaaggacacctacgacgcccttcacatgcaggccctgccccctcgc

SEQ ID NO: 3593 - DNA, 1506 bp, synthetic construct
  misc_feature 1..1506: note = Synthetic
  source 1..1506: mol_type = other DNA
atggccttaccagtgaccgccttgctcctgccgctggccttgctgctccacgccgccaggccggaggtgcagctgctggaaagcggcggaggactggtccagcctggcggcagcctgcggctgagctgcgccgcctctggcagaatcttcggcgagtacttcatcggatggtttcggcaggccccaggaaaagagcgcgagttcgtgtccgccattatcacaggcagcggcatcacccactacgccgacagcgtgaagggcagattcaccatctccagagacaactctaagaataccctgtacctgcagatgaacagcctcaagcctgaagatacagccgtgtactactgtgctgctagaacagactacaccaccggccaagagctgcccgaatatggctactggggccagggcacccaggtgaccgtgagcagcggtggcggtggctcgggcggtggtgggtcgggtggcggcggatctgaggtgcagctgctggagagcggtggtggtctggtgcagccgggggggagcctacggttgtcatgcgcggcaagtgggcgcatcttcggcgagtacttcatcggatggttccgccaggccccaggcaaggagagggagttcgtctcggccatcattaccggctccggcatcactcactacgcggacagcgttaagggccgcttcaccatctctcgcgacaactccaagaacacgctttacctgcagatgaattccctcaaacctgaagacaccgccgtgtactactgtgctgctcgtactgattacaccacaggacaggagctgcccgagtacggctattggggccaaggcacccaggtcaccgtgtcctctaccacgacgccagcgccgcggccaccaacaccggcgcccaccatcgcgtcgcagcccctgtccctgcgcccagaggcgtgccggccagcggcggggggcgcagtgcacacgagggggctggacttcgcctgtgatatctacatctgggcgcccttggccgggacttgtggggtccttctcctgtcactggttatcaccctttactgccggagggaccagaggctgccccccgatgcccacaagccccctgggggaggcagtttccggacccccatccaagaggagcaggccgacgcccactccaccctggccaagatcagagtgaagttcagcaggagcgcagacgcccccgcgtaccagcagggccagaaccagctctataacgagctcaatctaggacgaagagaggagtacgatgttttggacaagagacgtggccgggaccctgagatggggggaaagccgagaaggaagaaccctcaggaaggcctgtacaatgaactgcagaaagataagatggcggaggcctacagtgagattgggatgaaaggcgagcgccggaggggcaaggggcacgatggcctttaccagggtctcagtacagccaccaaggacacctacgacgcccttcacatgcaggccctgccccctcgc

SEQ ID NO: 3594 - DNA, 1476 bp, synthetic construct
  misc_feature 1..1476: note = Synthetic
  source 1..1476: mol_type = other DNA
atggccttaccagtgaccgccttgctcctgccgctggccttgctgctccacgccgccaggccggaggtgcagctgctggaaagcggcggcggcctcgtgcaacctggcggaagcctgagactgagctgcgccgcttctggctctatcgagagcatctacttcatcggctggttcagacaggcccctggcaaggaacgggaattcgtgtccgccgagtttatccccggaggcagcaccgtctacagcgacagcgtgaagggcagattcaccatcagcagagataacagcaagaacaccctgtacctgcagatgaacagcctgaaaccagaggacaccgccgtgtactactgtaatgccggcctggacgagggccggtactatacatactggggccagggcacacaggtgaccgtgtctagcggtggcggtggctcgggcggtggtgggtcgggtggcggcggatctgaggtgcagctgctggagagtggaggagggctggtgcagccagggggttctttgcgcctgagctgtgctgcttccggctccattgagagcatctactttatcggttggttccgccaggcccccggcaaggagagggagttcgtctcggcggagttcatcccgggcggctccactgtttacagcgattctgtgaagggccgcttcaccatctctcgggacaactccaagaacacgctatacctgcaaatgaacagccttaaacctgaagacaccgccgtgtactactgcaatgcaggtctcgacgagggccgttattacacctattggggccagggcacccaggtcacagtgtcgtccaccacgacgccagcgccgcggccaccaacaccggcgcccaccatcgcgtcgcagcccctgtccctgcgcccagaggcgtgccggccagcggcggggggcgcagtgcacacgagggggctggacttcgcctgtgatatctacatctgggcgcccttggccgggacttgtggggtccttctcctgtcactggttatcaccctttactgccggagggaccagaggctgccccccgatgcccacaagccccctgggggaggcagtttccggacccccatccaagaggagcaggccgacgcccactccaccctggccaagatcagagtgaagttcagcaggagcgcagacgcccccgcgtaccagcagggccagaaccagctctataacgagctcaatctaggacgaagagaggagtacgatgttttggacaagagacgtggccgggaccctgagatggggggaaagccgagaaggaagaaccctcaggaaggcctgtacaatgaactgcagaaagataagatggcggaggcctacagtgagattgggatgaaaggcgagcgccggaggggcaaggggcacgatggcctttaccagggtctcagtacagccaccaaggacacctacgacgcccttcacatgcaggccctgccccctcgc

SEQ ID NO: 3595 - DNA, 1458 bp, synthetic construct
  misc_feature 1..1458: note = Synthetic
  source 1..1458: mol_type = other DNA
atggccttaccagtgaccgccttgctcctgccgctggccttgctgctccacgccgccaggccggaggttcagctgctggaaagcggaggcggcctggtgcaacctggcggcagcctgcggctgagctgtgccgcttctggcatcgaggtgtctagcagcgtggtcggctggtttagacaggcccctggcaaggaaagagagttcgtgtccgccagcggcgtgggcggatctacatactacgctgatagcgtgaaaggcagattcaccatcagccgggacaatagcaagaacaccctgtacctgcagatgaacagcctcaagcccgaggacaccgccgtgtattactgctacgccgtgtacctgaccatctacacatactggggacagggcacacaggtgaccgtgtcctccggtggcggtggctcgggcggtggtgggtcgggtggcggcggatctgaagtgcagctgctggagagcggaggtgggctggtgcagccggggggttctcttcgtctatcatgcgccgcttctggcattgaggtgagcagttccgtggtgggttggttccggcaggcccctggcaaggagcgcgagttcgtctccgcctccggagtaggcggctccacatactacgcggacagcgttaaaggccgctttactatctctcgcgataactccaagaacactctgtacctgcagatgaattccctcaagcccgaggacaccgccgtgtactattgttacgcagtctacttgacgatctacacctattggggccaaggcacccaggtcaccgtgtcgtcgaccacgacgccagcgccgcggccaccaacaccggcgcccaccatcgcgtcgcagcccctgtccctgcgcccagaggcgtgccggccagcggcggggggcgcagtgcacacgagggggctggacttcgcctgtgatatctacatctgggcgcccttggccgggacttgtggggtccttctcctgtcactggttatcaccctttactgccggagggaccagaggctgccccccgatgcccacaagccccctgggggaggcagtttccggacccccatccaagaggagcaggccgacgcccactccaccctggccaagatcagagtgaagttcagcaggagcgcagacgcccccgcgtaccagcagggccagaaccagctctataacgagctcaatctaggacgaagagaggagtacgatgttttggacaagagacgtggccgggaccctgagatggggggaaagccgagaaggaagaaccctcaggaaggcctgtacaatgaactgcagaaagataagatggcggaggcctacagtgagattgggatgaaaggcgagcgccggaggggcaaggggcacgatggcctttaccagggtctcagtacagccaccaaggacacctacgacgcccttcacatgcaggccctgccccctcgc

SEQ ID NO: 3596 - DNA, 1464 bp, synthetic construct
  misc_feature 1..1464: note = Synthetic
  source 1..1464: mol_type = other DNA
atggccttaccagtgaccgccttgctcctgccgctggccttgctgctccacgccgccaggccggaggtgcagctcctggaaagcggcggaggcctggtgcaacctggaggctctctgagactgtcttgtgccgctagcggatttaccatctccagatacgccatggcctggttccggcaggcccctggcaaggaaagagagttcgtgtccggcagcatcttcgtgggcggcggcacatactatagagatagcgtgaaaggccgcttcaccatcagccgggacaatagcaagaacaccctgtacctgcagatgaacagcctgaagcccgaggacaccgccgtgtactactgctacgctacagtcggcgacagctactactactggggccagggcacccaggtgacagtgtctagcggtggcggtggctcgggcggtggtgggtcgggtggcggcggatctgaggtgcagctgctggagagcggtggagggctggtgcagccgggaggctccctccgcttgtcatgcgctgcaagtggctttactatttcccgctacgccatggcttggttcaggcaagcccccggcaaggagcgggagttcgttagcggctccatcttcgtcggtggtggcacctactaccgtgattctgtgaagggccgcttcaccatctctcgcgacaactccaagaacacgctttacctgcagatgaattctctgaaacctgaagacactgccgtgtactactgttacgcgacagtaggggacagctattactattggggccagggcacccaggtcaccgtgtcgtcgaccacgacgccagcgccgcggccaccaacaccggcgcccaccatcgcgtcgcagcccctgtccctgcgcccagaggcgtgccggccagcggcggggggcgcagtgcacacgagggggctggacttcgcctgtgatatctacatctgggcgcccttggccgggacttgtggggtccttctcctgtcactggttatcaccctttactgccggagggaccagaggctgccccccgatgcccacaagccccctgggggaggcagtttccggacccccatccaagaggagcaggccgacgcccactccaccctggccaagatcagagtgaagttcagcaggagcgcagacgcccccgcgtaccagcagggccagaaccagctctataacgagctcaatctaggacgaagagaggagtacgatgttttggacaagagacgtggccgggaccctgagatggggggaaagccgagaaggaagaaccctcaggaaggcctgtacaatgaactgcagaaagataagatggcggaggcctacagtgagattgggatgaaaggcgagcgccggaggggcaaggggcacgatggcctttaccagggtctcagtacagccaccaaggacacctacgacgcccttcacatgcaggccctgccccctcgc

SEQ ID NO: 3597 - DNA, 1458 bp, synthetic construct
  misc_feature 1..1458: note = Synthetic
  source 1..1458: mol_type = other DNA
atggccttaccagtgaccgccttgctcctgccgctggccttgctgctccacgccgccaggccggaggtgcagctgctggaaagcggcggaggcctggtgcaacctggaggcagcctgagactgagctgcgctgcttctggcagcctgttcagcgtggaacacatcggctggtttagacaggcccctggcaaagagcgggagttcgtgtccgcccaggttacaggcggcggctacacctactacgccgacagcgtgaagggcagattcaccatcagcagagataatagcaagaacaccctgtacctgcagatgaacagcctcaagcccgaggacaccgccgtgtactattgttacgtgcggctggtcgaggaagcctactggggccagggcacccaggtgacagtgtcttctggtggcggtggctcgggcggtggtgggtcgggtggcggcggatctgaggtgcagctgctggagagcggagggggattggtgcagccggggggctcccttcgtctaagttgcgccgcttccggttctctgttttcagtggagcacatcggttggttccgccaggcccccggcaaggagcgggagttcgtcagcgcacaagtcaccggcggtggctacacctattacgcggacagcgttaagggccgcttcaccatttctagggacaactccaagaacacgctgtacctgcagatgaattccctcaaacctgaagatacagccgtgtactactgttacgtgcgcctggtggaggaggcttattggggccagggcacccaggtcactgtatcgtcgaccacgacgccagcgccgcggccaccaacaccggcgcccaccatcgcgtcgcagcccctgtccctgcgcccagaggcgtgccggccagcggcggggggcgcagtgcacacgagggggctggacttcgcctgtgatatctacatctgggcgcccttggccgggacttgtggggtccttctcctgtcactggttatcaccctttactgccggagggaccagaggctgccccccgatgcccacaagccccctgggggaggcagtttccggacccccatccaagaggagcaggccgacgcccactccaccctggccaagatcagagtgaagttcagcaggagcgcagacgcccccgcgtaccagcagggccagaaccagctctataacgagctcaatctaggacgaagagaggagtacgatgttttggacaagagacgtggccgggaccctgagatggggggaaagccgagaaggaagaaccctcaggaaggcctgtacaatgaactgcagaaagataagatggcggaggcctacagtgagattgggatgaaaggcgagcgccggaggggcaaggggcacgatggcctttaccagggtctcagtacagccaccaaggacacctacgacgcccttcacatgcaggccctgccccctcgc

SEQ ID NO: 3598 - DNA, 1464 bp, synthetic construct
  misc_feature 1..1464: note = Synthetic
  source 1..1464: mol_type = other DNA
atggccttaccagtgaccgccttgctcctgccgctggccttgctgctccacgccgccaggccggaggtgcagctgctggaaagcggaggcggcctggtccaacctggaggcagcctgagactgagctgcgccgctagcggctttatcttcagcatctacgacatgggctggttccggcaggcccctggcaaagagcgggaattcgtgtccgccatctctacaacaggcggatctatctactacgccgacagcgtgaagggcagattcaccatcagcagagataacagcaagaacaccctgtacctgcagatgaactccctcaagcccgaggacaccgccgtgtactattgtaatgctgatccactggagagctacggctactggggccagggcacccaggtgaccgtgtctagcggtggcggtggctcgggcggtggtgggtcgggtggcggcggatctgaggtgcaactgctggagagtgggggagggctggtgcagccgggaggctccctccgtctttcgtgtgctgcttccggcttcatcttttcaatttacgacatgggctggttccgccaggcccccggcaaggagcgcgagttcgtctctgccatctcgaccacaggtggttccatctattacgcggacagcgtgaagggtcgcttcaccatctctcgggacaactccaagaacacgctatacctgcagatgaacagcttgaaacctgaagatactgccgtgtactactgcaatgcagaccccctggagagctacggctattggggccagggcacccaggtcaccgtttcttccaccacgacgccagcgccgcggccaccaacaccggcgcccaccatcgcgtcgcagcccctgtccctgcgcccagaggcgtgccggccagcggcggggggcgcagtgcacacgagggggctggacttcgcctgtgatatctacatctgggcgcccttggccgggacttgtggggtccttctcctgtcactggttatcaccctttactgccggagggaccagaggctgccccccgatgcccacaagccccctgggggaggcagtttccggacccccatccaagaggagcaggccgacgcccactccaccctggccaagatcagagtgaagttcagcaggagcgcagacgcccccgcgtaccagcagggccagaaccagctctataacgagctcaatctaggacgaagagaggagtacgatgttttggacaagagacgtggccgggaccctgagatggggggaaagccgagaaggaagaaccctcaggaaggcctgtacaatgaactgcagaaagataagatggcggaggcctacagtgagattgggatgaaaggcgagcgccggaggggcaaggggcacgatggcctttaccagggtctcagtacagccaccaaggacacctacgacgcccttcacatgcaggccctgccccctcgc

SEQ ID NO: 3599 - DNA, 1476 bp, synthetic construct
  misc_feature 1..1476: note = Synthetic
  source 1..1476: mol_type = other DNA
atggccttaccagtgaccgccttgctcctgccgctggccttgctgctccacgccgccaggccggaggtgcagctgctggaatctggcggcggactggtgcaacctggcggcagcctgagactgagctgcgccgcttctggctctgtgttcagctcctactttatcggctggttccggcaggcccctggaaaggaaagagagttcgtgtccgccgtgatctccagcagcggaagcacctactacgccgacagcgtgaaaggcagattcaccatcagccgggacaatagcaagaacaccctgtacctgcagatgaacagcctcaagcccgaggacacagctgtctactattgtgtggccagagaagatgtgggcgagccatacggctactggggccagggcacacaggtgaccgtgtctagcggtggcggtggctcgggcggtggtgggtcgggtggcggcggatctgaggtgcagctgctggagagcggcggcggtctggtgcagccgggaggctccctccgcctgtcatgcgccgcttccggatcggtgttttctagctacttcatcggttggttccgccaggcccccgggaaggagcgggagttcgtctccgccgtgatttcttcttctggctccacctactacgcggacagcgtgaagggtcgcttcaccatctcgcgtgacaactccaaaaacacgctttacctgcagatgaattccttgaagcctgaagatacagccgtgtactactgcgtggcaagggaggacgtgggggagccctatggctattggggccaaggcacccaggtcactgtatccagtaccacgacgccagcgccgcggccaccaacaccggcgcccaccatcgcgtcgcagcccctgtccctgcgcccagaggcgtgccggccagcggcggggggcgcagtgcacacgagggggctggacttcgcctgtgatatctacatctgggcgcccttggccgggacttgtggggtccttctcctgtcactggttatcaccctttactgccggagggaccagaggctgccccccgatgcccacaagccccctgggggaggcagtttccggacccccatccaagaggagcaggccgacgcccactccaccctggccaagatcagagtgaagttcagcaggagcgcagacgcccccgcgtaccagcagggccagaaccagctctataacgagctcaatctaggacgaagagaggagtacgatgttttggacaagagacgtggccgggaccctgagatggggggaaagccgagaaggaagaaccctcaggaaggcctgtacaatgaactgcagaaagataagatggcggaggcctacagtgagattgggatgaaaggcgagcgccggaggggcaaggggcacgatggcctttaccagggtctcagtacagccaccaaggacacctacgacgcccttcacatgcaggccctgccccctcgc

SEQ ID NO: 3600 - protein, 719 aa, synthetic construct
  REGION 1..719: note = Synthetic
MALPVTALLLPLALLLHAARPEVQLLESGGGLVQPGGSLRLSCAASGRGFTSYYMGWFRQAPGKEREFVSAVIFPEGYRYYADSVKGRFTISRDNSKNTLYLQMNSLKPEDTAVYYCAKYTGFGEDAYRYWGQGTQVTVSSGGGGSGGGGSGGGGSEVQLLESGGGLVQPGGSLRLSCAASGRGFTSYYMGWFRQAPGKEREFVSAVIFPEGYRYYADSVKGRFTISRDNSKNTLYLQMNSLKPEDTAVYYCAKYTGFGEDAYRYWGQGTQVTVSSTTTPAPRPPTPAPTIASQPLSLRPEACRPAAGGAVHTRGLDFACDIYIWAPLAGTCGVLLLSLVITLYCRRDQRLPPDAHKPPGGGSFRTPIQEEQADAHSTLAKIRVKFSRSADAPAYQQGQNQLYNELNLGRREEYDVLDKRRGRDPEMGGKPRRKNPQEGLYNELQKDKMAEAYSEIGMKGERRRGKGHDGLYQGLSTATKDTYDALHMQALPPRGSGEGRGSLLTCGDVEENPGPMALPVTALLLPLALLLHAARPNWVNVISDLKKIEDLIQSMHIDATLYTESDVHPSCKVTAMKCFLLELQVISLESGDASIHDTVENLIILANNSLSSNGNVTESGCKECEELEEKNIKEFLQSFVHIVQMFINTSTTTPAPRPPTPAPTIASQPLSLRPEACRPAAGGAVHTRGLDFACDIYIWAPLAGTCGVLLLSLVITLYC

SEQ ID NO: 3601 - protein, 717 aa, synthetic construct
  REGION 1..717: note = Synthetic
MALPVTALLLPLALLLHAARPEVQLLESGGGLVQPGGSLRLSCAASGLTFSIHTVGWFRQAPGKEREFVSAALGSGGRPYYRDSVKGRFTISRDNSKNTLYLQMNSLKPEDTAVYYCYVDVGTGLYYGYWGQGTQVTVSSGGGGSGGGGSGGGGSEVQLLESGGGLVQPGGSLRLSCAASGLTFSIHTVGWFRQAPGKEREFVSAALGSGGRPYYRDSVKGRFTISRDNSKNTLYLQMNSLKPEDTAVYYCYVDVGTGLYYGYWGQGTQVTVSSTTTPAPRPPTPAPTIASQPLSLRPEACRPAAGGAVHTRGLDFACDIYIWAPLAGTCGVLLLSLVITLYCRRDQRLPPDAHKPPGGGSFRTPIQEEQADAHSTLAKIRVKFSRSADAPAYQQGQNQLYNELNLGRREEYDVLDKRRGRDPEMGGKPRRKNPQEGLYNELQKDKMAEAYSEIGMKGERRRGKGHDGLYQGLSTATKDTYDALHMQALPPRGSGEGRGSLLTCGDVEENPGPMALPVTALLLPLALLLHAARPNWVNVISDLKKIEDLIQSMHIDATLYTESDVHPSCKVTAMKCFLLELQVISLESGDASIHDTVENLIILANNSLSSNGNVTESGCKECEELEEKNIKEFLQSFVHIVQMFINTSTTTPAPRPPTPAPTIASQPLSLRPEACRPAAGGAVHTRGLDFACDIYIWAPLAGTCGVLLLSLVITLYC

SEQ ID NO: 3602 - protein, 723 aa, synthetic construct
  REGION 1..723: note = Synthetic
MALPVTALLLPLALLLHAARPEVQLLESGGGLVQPGGSLRLSCAASGRIFSSYFMGWFRQAPGKEREFVSAHISSEGSTYYRDSVKGRFTISRDNSKNTLYLQMNSLKPEDTAVYYCAAREYADTQRGEYAYWGQGTQVTVSSGGGGSGGGGSGGGGSEVQLLESGGGLVQPGGSLRLSCAASGRIFSSYFMGWFRQAPGKEREFVSAHISSEGSTYYRDSVKGRFTISRDNSKNTLYLQMNSLKPEDTAVYYCAAREYADTQRGEYAYWGQGTQVTVSSTTTPAPRPPTPAPTIASQPLSLRPEACRPAAGGAVHTRGLDFACDIYIWAPLAGTCGVLLLSLVITLYCRRDQRLPPDAHKPPGGGSFRTPIQEEQADAHSTLAKIRVKFSRSADAPAYQQGQNQLYNELNLGRREEYDVLDKRRGRDPEMGGKPRRKNPQEGLYNELQKDKMAEAYSEIGMKGERRRGKGHDGLYQGLSTATKDTYDALHMQALPPRGSGEGRGSLLTCGDVEENPGPMALPVTALLLPLALLLHAARPNWVNVISDLKKIEDLIQSMHIDATLYTESDVHPSCKVTAMKCFLLELQVISLESGDASIHDTVENLIILANNSLSSNGNVTESGCKECEELEEKNIKEFLQSFVHIVQMFINTSTTTPAPRPPTPAPTIASQPLSLRPEACRPAAGGAVHTRGLDFACDIYIWAPLAGTCGVLLLSLVITLYC

SEQ ID NO: 3603 - protein, 713 aa, synthetic construct
  REGION 1..713: note = Synthetic
MALPVTALLLPLALLLHAARPEVQLLESGGGLVQPGGSLRLSCAASGSIVSSYAMGWFRQAPGKEREFVSSAIGKGGVTIYADSVKGRFTISRDNSKNTLYLQMNSLKPEDTAVYYCATDESTYRDYWGQGTQVTVSSGGGGSGGGGSGGGGSEVQLLESGGGLVQPGGSLRLSCAASGSIVSSYAMGWFRQAPGKEREFVSSAIGKGGVTIYADSVKGRFTISRDNSKNTLYLQMNSLKPEDTAVYYCATDESTYRDYWGQGTQVTVSSTTTPAPRPPTPAPTIASQPLSLRPEACRPAAGGAVHTRGLDFACDIYIWAPLAGTCGVLLLSLVITLYCRRDQRLPPDAHKPPGGGSFRTPIQEEQADAHSTLAKIRVKFSRSADAPAYQQGQNQLYNELNLGRREEYDVLDKRRGRDPEMGGKPRRKNPQEGLYNELQKDKMAEAYSEIGMKGERRRGKGHDGLYQGLSTATKDTYDALHMQALPPRGSGEGRGSLLTCGDVEENPGPMALPVTALLLPLALLLHAARPNWVNVISDLKKIEDLIQSMHIDATLYTESDVHPSCKVTAMKCFLLELQVISLESGDASIHDTVENLIILANNSLSSNGNVTESGCKECEELEEKNIKEFLQSFVHIVQMFINTSTTTPAPRPPTPAPTIASQPLSLRPEACRPAAGGAVHTRGLDFACDIYIWAPLAGTCGVLLLSLVITLYC

SEQ ID NO: 3604 - protein, 711 aa, synthetic construct
  REGION 1..711: note = Synthetic
MALPVTALLLPLALLLHAARPEVQLLESGGGLVQPGGSLRLSCAASGSLFQVEHIGWFRQAPGKERDFVSAQVTGGGYTYYADSVKGRFTISRDNSKNTLYLQMNSLKPEDTAVYYCYVRLVEEAYWGQGTQVTVSSGGGGSGGGGSGGGGSEVQLLESGGGLVQPGGSLRLSCAASGSLFQVEHIGWFRQAPGKERDFVSAQVTGGGYTYYADSVKGRFTISRDNSKNTLYLQMNSLKPEDTAVYYCYVRLVEEAYWGQGTQVTVSSTTTPAPRPPTPAPTIASQPLSLRPEACRPAAGGAVHTRGLDFACDIYIWAPLAGTCGVLLLSLVITLYCRRDQRLPPDAHKPPGGGSFRTPIQEEQADAHSTLAKIRVKFSRSADAPAYQQGQNQLYNELNLGRREEYDVLDKRRGRDPEMGGKPRRKNPQEGLYNELQKDKMAEAYSEIGMKGERRRGKGHDGLYQGLSTATKDTYDALHMQALPPRGSGEGRGSLLTCGDVEENPGPMALPVTALLLPLALLLHAARPNWVNVISDLKKIEDLIQSMHIDATLYTESDVHPSCKVTAMKCFLLELQVISLESGDASIHDTVENLIILANNSLSSNGNVTESGCKECEELEEKNIKEFLQSFVHIVQMFINTSTTTPAPRPPTPAPTIASQPLSLRPEACRPAAGGAVHTRGLDFACDIYIWAPLAGTCGVLLLSLVITLYC

SEQ ID NO: 3605 - protein, 723 aa, synthetic construct
  REGION 1..723: note = Synthetic
MALPVTALLLPLALLLHAARPEVQLLESGGGLVQPGGSLRLSCAASGTTFASSFMGWFRQAPGKEREFVSAIVFPGGSTYYADSVKGRFTISRDNSKNTLYLQMNSLKPEDTAVYYCAARRYELVDRLEYAYWGQGTQVTVSSGGGGSGGGGSGGGGSEVQLLESGGGLVQPGGSLRLSCAASGTTFASSFMGWFRQAPGKEREFVSAIVFPGGSTYYADSVKGRFTISRDNSKNTLYLQMNSLKPEDTAVYYCAARRYELVDRLEYAYWGQGTQVTVSSTTTPAPRPPTPAPTIASQPLSLRPEACRPAAGGAVHTRGLDFACDIYIWAPLAGTCGVLLLSLVITLYCRRDQRLPPDAHKPPGGGSFRTPIQEEQADAHSTLAKIRVKFSRSADAPAYQQGQNQLYNELNLGRREEYDVLDKRRGRDPEMGGKPRRKNPQEGLYNELQKDKMAEAYSEIGMKGERRRGKGHDGLYQGLSTATKDTYDALHMQALPPRGSGEGRGSLLTCGDVEENPGPMALPVTALLLPLALLLHAARPNWVNVISDLKKIEDLIQSMHIDATLYTESDVHPSCKVTAMKCFLLELQVISLESGDASIHDTVENLIILANNSLSSNGNVTESGCKECEELEEKNIKEFLQSFVHIVQMFINTSTTTPAPRPPTPAPTIASQPLSLRPEACRPAAGGAVHTRGLDFACDIYIWAPLAGTCGVLLLSLVITLYC

SEQ ID NO: 3606 - protein, 713 aa, synthetic construct
  REGION 1..713: note = Synthetic
MALPVTALLLPLALLLHAARPEVQLLESGGGLVQPGGSLRLSCAASGSVFSSFTIGWFRQAPGKEREFVSAIVTSTGSTYYADSVKGRFTISRDNSKNTLYLQMNSLKPEDTAVYYCNVRTQEDYYYWGQGTQVTVSSGGGGSGGGGSGGGGSEVQLLESGGGLVQPGGSLRLSCAASGSVFSSFTIGWFRQAPGKEREFVSAIVTSTGSTYYADSVKGRFTISRDNSKNTLYLQMNSLKPEDTAVYYCNVRTQEDYYYWGQGTQVTVSSTTTPAPRPPTPAPTIASQPLSLRPEACRPAAGGAVHTRGLDFACDIYIWAPLAGTCGVLLLSLVITLYCRRDQRLPPDAHKPPGGGSFRTPIQEEQADAHSTLAKIRVKFSRSADAPAYQQGQNQLYNELNLGRREEYDVLDKRRGRDPEMGGKPRRKNPQEGLYNELQKDKMAEAYSEIGMKGERRRGKGHDGLYQGLSTATKDTYDALHMQALPPRGSGEGRGSLLTCGDVEENPGPMALPVTALLLPLALLLHAARPNWVNVISDLKKIEDLIQSMHIDATLYTESDVHPSCKVTAMKCFLLELQVISLESGDASIHDTVENLIILANNSLSSNGNVTESGCKECEELEEKNIKEFLQSFVHIVQMFINTSTTTPAPRPPTPAPTIASQPLSLRPEACRPAAGGAVHTRGLDFACDIYIWAPLAGTCGVLLLSLVITLYC

SEQ ID NO: 3607 - protein, 723 aa, synthetic construct
  REGION 1..723: note = Synthetic
MALPVTALLLPLALLLHAARPEVQLLESGGGLVQPGGSLRLSCAASGSIFGSHFMGWFRQAPGKEREFVSAAVTSGGSTYYADSVKGRFTISRDNSKNTLYLQMNSLKPEDTAVYYCAARTYQSTYQPEYAYWGQGTQVTVSSGGGGSGGGGSGGGGSEVQLLESGGGLVQPGGSLRLSCAASGSIFGSHFMGWFRQAPGKEREFVSAAVTSGGSTYYADSVKGRFTISRDNSKNTLYLQMNSLKPEDTAVYYCAARTYQSTYQPEYAYWGQGTQVTVSSTTTPAPRPPTPAPTIASQPLSLRPEACRPAAGGAVHTRGLDFACDIYIWAPLAGTCGVLLLSLVITLYCRRDQRLPPDAHKPPGGGSFRTPIQEEQADAHSTLAKIRVKFSRSADAPAYQQGQNQLYNELNLGRREEYDVLDKRRGRDPEMGGKPRRKNPQEGLYNELQKDKMAEAYSEIGMKGERRRGKGHDGLYQGLSTATKDTYDALHMQALPPRGSGEGRGSLLTCGDVEENPGPMALPVTALLLPLALLLHAARPNWVNVISDLKKIEDLIQSMHIDATLYTESDVHPSCKVTAMKCFLLELQVISLESGDASIHDTVENLIILANNSLSSNGNVTESGCKECEELEEKNIKEFLQSFVHIVQMFINTSTTTPAPRPPTPAPTIASQPLSLRPEACRPAAGGAVHTRGLDFACDIYIWAPLAGTCGVLLLSLVITLYC

SEQ ID NO: 3608 - protein, 727 aa, synthetic construct
  REGION 1..727: note = Synthetic
MALPVTALLLPLALLLHAARPEVQLLESGGGLVQPGGSLRLSCAASGSIFSILDIGWFRQAPGKEREFVSAYISSGGSTYYSDSVKGRFTISRDNSKNTLYLQMNSLKPEDTAVYYCVATIFGDRTEGQERYAFWGQGTQVTVSSGGGGSGGGGSGGGGSEVQLLESGGGLVQPGGSLRLSCAASGSIFSILDIGWFRQAPGKEREFVSAYISSGGSTYYSDSVKGRFTISRDNSKNTLYLQMNSLKPEDTAVYYCVATIFGDRTEGQERYAFWGQGTQVTVSSTTTPAPRPPTPAPTIASQPLSLRPEACRPAAGGAVHTRGLDFACDIYIWAPLAGTCGVLLLSLVITLYCRRDQRLPPDAHKPPGGGSFRTPIQEEQADAHSTLAKIRVKFSRSADAPAYQQGQNQLYNELNLGRREEYDVLDKRRGRDPEMGGKPRRKNPQEGLYNELQKDKMAEAYSEIGMKGERRRGKGHDGLYQGLSTATKDTYDALHMQALPPRGSGEGRGSLLTCGDVEENPGPMALPVTALLLPLALLLHAARPNWVNVISDLKKIEDLIQSMHIDATLYTESDVHPSCKVTAMKCFLLELQVISLESGDASIHDTVENLIILANNSLSSNGNVTESGCKECEELEEKNIKEFLQSFVHIVQMFINTSTTTPAPRPPTPAPTIASQPLSLRPEACRPAAGGAVHTRGLDFACDIYIWAPLAGTCGVLLLSLVITLYC

SEQ ID NO: 3609 - protein, 723 aa, synthetic construct
  REGION 1..723: note = Synthetic
MALPVTALLLPLALLLHAARPEVQLLESGGGLVQPGGSLRLSCAASGSTTSSYFMGWFRQAPGKEREFVSAIITSSGSPYYADSVKGRFTISRDNSKNTLYLQMNSLKPEDTAVYYCAARRYGSRETDDYGYWGQGTQVTVSSGGGGSGGGGSGGGGSEVQLLESGGGLVQPGGSLRLSCAASGSTTSSYFMGWFRQAPGKEREFVSAIITSSGSPYYADSVKGRFTISRDNSKNTLYLQMNSLKPEDTAVYYCAARRYGSRETDDYGYWGQGTQVTVSSTTTPAPRPPTPAPTIASQPLSLRPEACRPAAGGAVHTRGLDFACDIYIWAPLAGTCGVLLLSLVITLYCRRDQRLPPDAHKPPGGGSFRTPIQEEQADAHSTLAKIRVKFSRSADAPAYQQGQNQLYNELNLGRREEYDVLDKRRGRDPEMGGKPRRKNPQEGLYNELQKDKMAEAYSEIGMKGERRRGKGHDGLYQGLSTATKDTYDALHMQALPPRGSGEGRGSLLTCGDVEENPGPMALPVTALLLPLALLLHAARPNWVNVISDLKKIEDLIQSMHIDATLYTESDVHPSCKVTAMKCFLLELQVISLESGDASIHDTVENLIILANNSLSSNGNVTESGCKECEELEEKNIKEFLQSFVHIVQMFINTSTTTPAPRPPTPAPTIASQPLSLRPEACRPAAGGAVHTRGLDFACDIYIWAPLAGTCGVLLLSLVITLYC

SEQ ID NO: 3610 - protein, 725 aa, synthetic construct
  REGION 1..725: note = Synthetic
MALPVTALLLPLALLLHAARPEVQLLESGGGLVQPGGSLRLSCAASGSVFSSYSMWFRQAPGKEREFVSAIITSGGSTYYADSVKGRFTISRDNSKNTLYLQMNSLKPEDTAVYYCVAVYGIGTGQYIGTYDIWGQGTQVTVSSGGGGSGGGGSGGGGSEVQLLESGGGLVQPGGSLRLSCAASGSVFSSYSMWFRQAPGKEREFVSAIITSGGSTYYADSVKGRFTISRDNSKNTLYLQMNSLKPEDTAVYYCVAVYGIGTGQYIGTYDIWGQGTQVTVSSTTTPAPRPPTPAPTIASQPLSLRPEACRPAAGGAVHTRGLDFACDIYIWAPLAGTCGVLLLSLVITLYCRRDQRLPPDAHKPPGGGSFRTPIQEEQADAHSTLAKIRVKFSRSADAPAYQQGQNQLYNELNLGRREEYDVLDKRRGRDPEMGGKPRRKNPQEGLYNELQKDKMAEAYSEIGMKGERRRGKGHDGLYQGLSTATKDTYDALHMQALPPRGSGEGRGSLLTCGDVEENPGPMALPVTALLLPLALLLHAARPNWVNVISDLKKIEDLIQSMHIDATLYTESDVHPSCKVTAMKCFLLELQVISLESGDASIHDTVENLIILANNSLSSNGNVTESGCKECEELEEKNIKEFLQSFVHIVQMFINTSTTTPAPRPPTPAPTIASQPLSLRPEACRPAAGGAVHTRGLDFACDIYIWAPLAGTCGVLLLSLVITLYC

SEQ ID NO: 3611 - protein, 721 aa, synthetic construct
  REGION 1..721: note = Synthetic
MALPVTALLLPLALLLHAARPEVQLLESGGGLVQPGGSLRLSCAASGSLLSIYDMGWFRQAPGKEREFVSARIGKGGSTYYADSVKGRFTISRDNSKNTLYLQMNSLKPEDTAVYYCAVLVGEGESYGYHYWGQGTQVTVSSGGGGSGGGGSGGGGSEVQLLESGGGLVQPGGSLRLSCAASGSLLSIYDMGWFRQAPGKEREFVSARIGKGGSTYYADSVKGRFTISRDNSKNTLYLQMNSLKPEDTAVYYCAVLVGEGESYGYHYWGQGTQVTVSSTTTPAPRPPTPAPTIASQPLSLRPEACRPAAGGAVHTRGLDFACDIYIWAPLAGTCGVLLLSLVITLYCRRDQRLPPDAHKPPGGGSFRTPIQEEQADAHSTLAKIRVKFSRSADAPAYQQGQNQLYNELNLGRREEYDVLDKRRGRDPEMGGKPRRKNPQEGLYNELQKDKMAEAYSEIGMKGERRRGKGHDGLYQGLSTATKDTYDALHMQALPPRGSGEGRGSLLTCGDVEENPGPMALPVTALLLPLALLLHAARPNWVNVISDLKKIEDLIQSMHIDATLYTESDVHPSCKVTAMKCFLLELQVISLESGDASIHDTVENLIILANNSLSSNGNVTESGCKECEELEEKNIKEFLQSFVHIVQMFINTSTTTPAPRPPTPAPTIASQPLSLRPEACRPAAGGAVHTRGLDFACDIYIWAPLAGTCGVLLLSLVITLYC

SEQ ID NO: 3612 - protein, 725 aa, synthetic construct
  REGION 1..725: note = Synthetic
MALPVTALLLPLALLLHAARPEVQLLESGGGLVQPGGSLRLSCAASGIGLSIYFMGWFRQAPGKEREFVSAIISSSGSTYYADSVKGRFTISRDNSKNTLYLQMNSLKPEDTAVYYCAARTGYSEYEQEDYGYWGQGTQVTVSSGGGGSGGGGSGGGGSEVQLLESGGGLVQPGGSLRLSCAASGIGLSIYFMGWFRQAPGKEREFVSAIISSSGSTYYADSVKGRFTISRDNSKNTLYLQMNSLKPEDTAVYYCAARTGYSEYEQEDYGYWGQGTQVTVSSTTTPAPRPPTPAPTIASQPLSLRPEACRPAAGGAVHTRGLDFACDIYIWAPLAGTCGVLLLSLVITLYCRRDQRLPPDAHKPPGGGSFRTPIQEEQADAHSTLAKIRVKFSRSADAPAYQQGQNQLYNELNLGRREEYDVLDKRRGRDPEMGGKPRRKNPQEGLYNELQKDKMAEAYSEIGMKGERRRGKGHDGLYQGLSTATKDTYDALHMQALPPRGSGEGRGSLLTCGDVEENPGPMALPVTALLLPLALLLHAARPNWVNVISDLKKIEDLIQSMHIDATLYTESDVHPSCKVTAMKCFLLELQVISLESGDASIHDTVENLIILANNSLSSNGNVTESGCKECEELEEKNIKEFLQSFVHIVQMFINTSTTTPAPRPPTPAPTIASQPLSLRPEACRPAAGGAVHTRGLDFACDIYIWAPLAGTCGVLLLSLVITLYC

SEQ ID NO: 3613 - protein, 723 aa, synthetic construct
  REGION 1..723: note = Synthetic
MALPVTALLLPLALLLHAARPEVQLLESGGGLVQPGGSLRLSCAASGSIFSSSFIGWFRQAPGKEREFVSAVIASSGSTYYADSVKGRFTISRDNSKNTLYLQMNSLKPEDTAVYYCAGRFGQGGGTVEYGYWGQGTQVTVSSGGGGSGGGGSGGGGSEVQLLESGGGLVQPGGSLRLSCAASGSIFSSSFIGWFRQAPGKEREFVSAVIASSGSTYYADSVKGRFTISRDNSKNTLYLQMNSLKPEDTAVYYCAGRFGQGGGTVEYGYWGQGTQVTVSSTTTPAPRPPTPAPTIASQPLSLRPEACRPAAGGAVHTRGLDFACDIYIWAPLAGTCGVLLLSLVITLYCRRDQRLPPDAHKPPGGGSFRTPIQEEQADAHSTLAKIRVKFSRSADAPAYQQGQNQLYNELNLGRREEYDVLDKRRGRDPEMGGKPRRKNPQEGLYNELQKDKMAEAYSEIGMKGERRRGKGHDGLYQGLSTATKDTYDALHMQALPPRGSGEGRGSLLTCGDVEENPGPMALPVTALLLPLALLLHAARPNWVNVISDLKKIEDLIQSMHIDATLYTESDVHPSCKVTAMKCFLLELQVISLESGDASIHDTVENLIILANNSLSSNGNVTESGCKECEELEEKNIKEFLQSFVHIVQMFINTSTTTPAPRPPTPAPTIASQPLSLRPEACRPAAGGAVHTRGLDFACDIYIWAPLAGTCGVLLLSLVITLYC

SEQ ID NO: 3614 - protein, 723 aa, synthetic construct
  REGION 1..723: note = Synthetic
MALPVTALLLPLALLLHAARPEVQLLESGGGLVQPGGSLRLSCAASGRVFSFYFMGWFRQAPGKEREFVSGVIGKTGSTYYTDSVKGRFTISRDNSKNTLYLQMNSLKPEDTAVYYCAASEYQGTGYGEFAYWGQGTQVTVSSGGGGSGGGGSGGGGSEVQLLESGGGLVQPGGSLRLSCAASGRVFSFYFMGWFRQAPGKEREFVSGVIGKTGSTYYTDSVKGRFTISRDNSKNTLYLQMNSLKPEDTAVYYCAASEYQGTGYGEFAYWGQGTQVTVSSTTTPAPRPPTPAPTIASQPLSLRPEACRPAAGGAVHTRGLDFACDIYIWAPLAGTCGVLLLSLVITLYCRRDQRLPPDAHKPPGGGSFRTPIQEEQADAHSTLAKIRVKFSRSADAPAYQQGQNQLYNELNLGRREEYDVLDKRRGRDPEMGGKPRRKNPQEGLYNELQKDKMAEAYSEIGMKGERRRGKGHDGLYQGLSTATKDTYDALHMQALPPRGSGEGRGSLLTCGDVEENPGPMALPVTALLLPLALLLHAARPNWVNVISDLKKIEDLIQSMHIDATLYTESDVHPSCKVTAMKCFLLELQVISLESGDASIHDTVENLIILANNSLSSNGNVTESGCKECEELEEKNIKEFLQSFVHIVQMFINTSTTTPAPRPPTPAPTIASQPLSLRPEACRPAAGGAVHTRGLDFACDIYIWAPLAGTCGVLLLSLVITLYC

SEQ ID NO: 3615 - protein, 711 aa, synthetic construct
  REGION 1..711: note = Synthetic
MALPVTALLLPLALLLHAARPEVQLLESGGGLVQPGGSLRLSCAASGSLFEVEHIGWFRQAPGKEREFVSAQVTGGGYTYYADSVKGRFTISRDNSKNTLYLQMNSLKPEDTAVYYCYVRLVEEAYWGQGTQVTVSSGGGGSGGGGSGGGGSEVQLLESGGGLVQPGGSLRLSCAASGSLFEVEHIGWFRQAPGKEREFVSAQVTGGGYTYYADSVKGRFTISRDNSKNTLYLQMNSLKPEDTAVYYCYVRLVEEAYWGQGTQVTVSSTTTPAPRPPTPAPTIASQPLSLRPEACRPAAGGAVHTRGLDFACDIYIWAPLAGTCGVLLLSLVITLYCRRDQRLPPDAHKPPGGGSFRTPIQEEQADAHSTLAKIRVKFSRSADAPAYQQGQNQLYNELNLGRREEYDVLDKRRGRDPEMGGKPRRKNPQEGLYNELQKDKMAEAYSEIGMKGERRRGKGHDGLYQGLSTATKDTYDALHMQALPPRGSGEGRGSLLTCGDVEENPGPMALPVTALLLPLALLLHAARPNWVNVISDLKKIEDLIQSMHIDATLYTESDVHPSCKVTAMKCFLLELQVISLESGDASIHDTVENLIILANNSLSSNGNVTESGCKECEELEEKNIKEFLQSFVHIVQMFINTSTTTPAPRPPTPAPTIASQPLSLRPEACRPAAGGAVHTRGLDFACDIYIWAPLAGTCGVLLLSLVITLYC

SEQ ID NO: 3616 - protein, 727 aa, synthetic construct
  REGION 1..727: note = Synthetic
MALPVTALLLPLALLLHAARPEVQLLESGGGLVQPGGSLRLSCAASGRIFGEYFIGWFRQAPGKEREFVSAIITGSGITHYADSVKGRFTISRDNSKNTLYLQMNSLKPEDTAVYYCAARTDYTTGQELPEYGYWGQGTQVTVSSGGGGSGGGGSGGGGSEVQLLESGGGLVQPGGSLRLSCAASGRIFGEYFIGWFRQAPGKEREFVSAIITGSGITHYADSVKGRFTISRDNSKNTLYLQMNSLKPEDTAVYYCAARTDYTTGQELPEYGYWGQGTQVTVSSTTTPAPRPPTPAPTIASQPLSLRPEACRPAAGGAVHTRGLDFACDIYIWAPLAGTCGVLLLSLVITLYCRRDQRLPPDAHKPPGGGSFRTPIQEEQADAHSTLAKIRVKFSRSADAPAYQQGQNQLYNELNLGRREEYDVLDKRRGRDPEMGGKPRRKNPQEGLYNELQKDKMAEAYSEIGMKGERRRGKGHDGLYQGLSTATKDTYDALHMQALPPRGSGEGRGSLLTCGDVEENPGPMALPVTALLLPLALLLHAARPNWVNVISDLKKIEDLIQSMHIDATLYTESDVHPSCKVTAMKCFLLELQVISLESGDASIHDTVENLIILANNSLSSNGNVTESGCKECEELEEKNIKEFLQSFVHIVQMFINTSTTTPAPRPPTPAPTIASQPLSLRPEACRPAAGGAVHTRGLDFACDIYIWAPLAGTCGVLLLSLVITLYC

SEQ ID NO: 3617 - protein, 717 aa, synthetic construct
  REGION 1..717: note = Synthetic
MALPVTALLLPLALLLHAARPEVQLLESGGGLVQPGGSLRLSCAASGSIESIYFIGWFRQAPGKEREFVSAEFIPGGSTVYSDSVKGRFTISRDNSKNTLYLQMNSLKPEDTAVYYCNAGLDEGRYYTYWGQGTQVTVSSGGGGSGGGGSGGGGSEVQLLESGGGLVQPGGSLRLSCAASGSIESIYFIGWFRQAPGKEREFVSAEFIPGGSTVYSDSVKGRFTISRDNSKNTLYLQMNSLKPEDTAVYYCNAGLDEGRYYTYWGQGTQVTVSSTTTPAPRPPTPAPTIASQPLSLRPEACRPAAGGAVHTRGLDFACDIYIWAPLAGTCGVLLLSLVITLYCRRDQRLPPDAHKPPGGGSFRTPIQEEQADAHSTLAKIRVKFSRSADAPAYQQGQNQLYNELNLGRREEYDVLDKRRGRDPEMGGKPRRKNPQEGLYNELQKDKMAEAYSEIGMKGERRRGKGHDGLYQGLSTATKDTYDALHMQALPPRGSGEGRGSLLTCGDVEENPGPMALPVTALLLPLALLLHAARPNWVNVISDLKKIEDLIQSMHIDATLYTESDVHPSCKVTAMKCFLLELQVISLESGDASIHDTVENLIILANNSLSSNGNVTESGCKECEELEEKNIKEFLQSFVHIVQMFINTSTTTPAPRPPTPAPTIASQPLSLRPEACRPAAGGAVHTRGLDFACDIYIWAPLAGTCGVLLLSLVITLYC

SEQ ID NO: 3618 - protein, 711 aa, synthetic construct
  REGION 1..711: note = Synthetic
MALPVTALLLPLALLLHAARPEVQLLESGGGLVQPGGSLRLSCAASGIEVSSSVVGWFRQAPGKEREFVSASGVGGSTYYADSVKGRFTISRDNSKNTLYLQMNSLKPEDTAVYYCYAVYLTIYTYWGQGTQVTVSSGGGGSGGGGSGGGGSEVQLLESGGGLVQPGGSLRLSCAASGIEVSSSVVGWFRQAPGKEREFVSASGVGGSTYYADSVKGRFTISRDNSKNTLYLQMNSLKPEDTAVYYCYAVYLTIYTYWGQGTQVTVSSTTTPAPRPPTPAPTIASQPLSLRPEACRPAAGGAVHTRGLDFACDIYIWAPLAGTCGVLLLSLVITLYCRRDQRLPPDAHKPPGGGSFRTPIQEEQADAHSTLAKIRVKFSRSADAPAYQQGQNQLYNELNLGRREEYDVLDKRRGRDPEMGGKPRRKNPQEGLYNELQKDKMAEAYSEIGMKGERRRGKGHDGLYQGLSTATKDTYDALHMQALPPRGSGEGRGSLLTCGDVEENPGPMALPVTALLLPLALLLHAARPNWVNVISDLKKIEDLIQSMHIDATLYTESDVHPSCKVTAMKCFLLELQVISLESGDASIHDTVENLIILANNSLSSNGNVTESGCKECEELEEKNIKEFLQSFVHIVQMFINTSTTTPAPRPPTPAPTIASQPLSLRPEACRPAAGGAVHTRGLDFACDIYIWAPLAGTCGVLLLSLVITLYC

SEQ ID NO: 3619 - protein, 713 aa, synthetic construct
  REGION 1..713: note = Synthetic
MALPVTALLLPLALLLHAARPEVQLLESGGGLVQPGGSLRLSCAASGFTISRYAMAWFRQAPGKEREFVSGSIFVGGGTYYRDSVKGRFTISRDNSKNTLYLQMNSLKPEDTAVYYCYATVGDSYYYWGQGTQVTVSSGGGGSGGGGSGGGGSEVQLLESGGGLVQPGGSLRLSCAASGFTISRYAMAWFRQAPGKEREFVSGSIFVGGGTYYRDSVKGRFTISRDNSKNTLYLQMNSLKPEDTAVYYCYATVGDSYYYWGQGTQVTVSSTTTPAPRPPTPAPTIASQPLSLRPEACRPAAGGAVHTRGLDFACDIYIWAPLAGTCGVLLLSLVITLYCRRDQRLPPDAHKPPGGGSFRTPIQEEQADAHSTLAKIRVKFSRSADAPAYQQGQNQLYNELNLGRREEYDVLDKRRGRDPEMGGKPRRKNPQEGLYNELQKDKMAEAYSEIGMKGERRRGKGHDGLYQGLSTATKDTYDALHMQALPPRGSGEGRGSLLTCGDVEENPGPMALPVTALLLPLALLLHAARPNWVNVISDLKKIEDLIQSMHIDATLYTESDVHPSCKVTAMKCFLLELQVISLESGDASIHDTVENLIILANNSLSSNGNVTESGCKECEELEEKNIKEFLQSFVHIVQMFINTSTTTPAPRPPTPAPTIASQPLSLRPEACRPAAGGAVHTRGLDFACDIYIWAPLAGTCGVLLLSLVITLYC

SEQ ID NO: 3620 - protein, 711 aa, synthetic construct
  REGION 1..711: note = Synthetic
MALPVTALLLPLALLLHAARPEVQLLESGGGLVQPGGSLRLSCAASGSLFSVEHIGWFRQAPGKEREFVSAQVTGGGYTYYADSVKGRFTISRDNSKNTLYLQMNSLKPEDTAVYYCYVRLVEEAYWGQGTQVTVSSGGGGSGGGGSGGGGSEVQLLESGGGLVQPGGSLRLSCAASGSLFSVEHIGWFRQAPGKEREFVSAQVTGGGYTYYADSVKGRFTISRDNSKNTLYLQMNSLKPEDTAVYYCYVRLVEEAYWGQGTQVTVSSTTTPAPRPPTPAPTIASQPLSLRPEACRPAAGGAVHTRGLDFACDIYIWAPLAGTCGVLLLSLVITLYCRRDQRLPPDAHKPPGGGSFRTPIQEEQADAHSTLAKIRVKFSRSADAPAYQQGQNQLYNELNLGRREEYDVLDKRRGRDPEMGGKPRRKNPQEGLYNELQKDKMAEAYSEIGMKGERRRGKGHDGLYQGLSTATKDTYDALHMQALPPRGSGEGRGSLLTCGDVEENPGPMALPVTALLLPLALLLHAARPNWVNVISDLKKIEDLIQSMHIDATLYTESDVHPSCKVTAMKCFLLELQVISLESGDASIHDTVENLIILANNSLSSNGNVTESGCKECEELEEKNIKEFLQSFVHIVQMFINTSTTTPAPRPPTPAPTIASQPLSLRPEACRPAAGGAVHTRGLDFACDIYIWAPLAGTCGVLLLSLVITLYC

SEQ ID NO: 3621 - protein, 713 aa, synthetic construct
  REGION 1..713: note = Synthetic
MALPVTALLLPLALLLHAARPEVQLLESGGGLVQPGGSLRLSCAASGFIFSIYDMGWFRQAPGKEREFVSAISTTGGSIYYADSVKGRFTISRDNSKNTLYLQMNSLKPEDTAVYYCNADPLESYGYWGQGTQVTVSSGGGGSGGGGSGGGGSEVQLLESGGGLVQPGGSLRLSCAASGFIFSIYDMGWFRQAPGKEREFVSAISTTGGSIYYADSVKGRFTISRDNSKNTLYLQMNSLKPEDTAVYYCNADPLESYGYWGQGTQVTVSSTTTPAPRPPTPAPTIASQPLSLRPEACRPAAGGAVHTRGLDFACDIYIWAPLAGTCGVLLLSLVITLYCRRDQRLPPDAHKPPGGGSFRTPIQEEQADAHSTLAKIRVKFSRSADAPAYQQGQNQLYNELNLGRREEYDVLDKRRGRDPEMGGKPRRKNPQEGLYNELQKDKMAEAYSEIGMKGERRRGKGHDGLYQGLSTATKDTYDALHMQALPPRGSGEGRGSLLTCGDVEENPGPMALPVTALLLPLALLLHAARPNWVNVISDLKKIEDLIQSMHIDATLYTESDVHPSCKVTAMKCFLLELQVISLESGDASIHDTVENLIILANNSLSSNGNVTESGCKECEELEEKNIKEFLQSFVHIVQMFINTSTTTPAPRPPTPAPTIASQPLSLRPEACRPAAGGAVHTRGLDFACDIYIWAPLAGTCGVLLLSLVITLYC

SEQ ID NO: 3622 - protein, 717 aa, synthetic construct
  REGION 1..717: note = Synthetic
MALPVTALLLPLALLLHAARPEVQLLESGGGLVQPGGSLRLSCAASGSVFSSYFIGWFRQAPGKEREFVSAVISSSGSTYYADSVKGRFTISRDNSKNTLYLQMNSLKPEDTAVYYCVAREDVGEPYGYWGQGTQVTVSSGGGGSGGGGSGGGGSEVQLLESGGGLVQPGGSLRLSCAASGSVFSSYFIGWFRQAPGKEREFVSAVISSSGSTYYADSVKGRFTISRDNSKNTLYLQMNSLKPEDTAVYYCVAREDVGEPYGYWGQGTQVTVSSTTTPAPRPPTPAPTIASQPLSLRPEACRPAAGGAVHTRGLDFACDIYIWAPLAGTCGVLLLSLVITLYCRRDQRLPPDAHKPPGGGSFRTPIQEEQADAHSTLAKIRVKFSRSADAPAYQQGQNQLYNELNLGRREEYDVLDKRRGRDPEMGGKPRRKNPQEGLYNELQKDKMAEAYSEIGMKGERRRGKGHDGLYQGLSTATKDTYDALHMQALPPRGSGEGRGSLLTCGDVEENPGPMALPVTALLLPLALLLHAARPNWVNVISDLKKIEDLIQSMHIDATLYTESDVHPSCKVTAMKCFLLELQVISLESGDASIHDTVENLIILANNSLSSNGNVTESGCKECEELEEKNIKEFLQSFVHIVQMFINTSTTTPAPRPPTPAPTIASQPLSLRPEACRPAAGGAVHTRGLDFACDIYIWAPLAGTCGVLLLSLVITLYC

SEQ ID NO: 3623 - DNA, 2160 bp, synthetic construct
  misc_feature 1..2160: note = Synthetic
  source 1..2160: mol_type = other DNA
atggccttaccagtgaccgccttgctcctgccgctggccttgctgctccacgccgccaggccggaggtgcagctgttggagtctgggggaggcttggtacagcctggggggtccctgagactctcctgtgcagcctctggaaggggctttacaagctattacatgggatggttccgccaggctccagggaaggaacgggagttcgtctcagctgtgattttcccggagggttaccgctactacgcagactccgtgaagggccggttcaccatctccagagacaattccaagaacacgctgtatctgcaaatgaacagcctgaagcccgaggacacggccgtatattactgtgcgaaatacacaggtttcggtgaggacgcctatcgctactggggccaagggacccaggtcaccgtctcctcaggtggaggcggttcaggcggaggtggctctggcggtggcggatcggaggtgcagctgttggagtctgggggaggcttggtacagcctggggggtccctgagactctcctgtgcagcctctggaaggggctttacaagctattacatgggatggttccgccaggctccagggaaggaacgggagttcgtctcagctgtgattttcccggagggttaccgctactacgcagactccgtgaagggccggttcaccatctccagagacaattccaagaacacgctgtatctgcaaatgaacagcctgaagcccgaggacacggccgtatattactgtgcgaaatacacaggtttcggtgaggacgcctatcgctactggggccaagggacccaggtcaccgtctcctcaaccacgacgccagcgccgcggccaccaacaccggcgcccaccatcgcgtcgcagcccctgtccctgcgcccagaggcgtgccggccagcggcggggggcgcagtgcacacgagggggctggacttcgcctgtgatatctacatctgggcgcccttggccgggacttgtggggtccttctcctgtcactggttatcaccctttactgccggagggaccagaggctgccccccgatgcccacaagccccctgggggaggcagtttccggacccccatccaagaggagcaggccgacgcccactccaccctggccaagatcagagtgaagttcagcaggagcgcagacgcccccgcgtaccagcagggccagaaccagctctataacgagctcaatctaggacgaagagaggagtacgatgttttggacaagagacgtggccgggaccctgagatggggggaaagccgagaaggaagaaccctcaggaaggcctgtacaatgaactgcagaaagataagatggcggaggcctacagtgagattgggatgaaaggcgagcgccggaggggcaaggggcacgatggcctttaccagggtctcagtacagccaccaaggacacctacgacgcccttcacatgcaggccctgccccctcgcggctctggcgagggaaggggttccctgcttacttgcggcgacgtcgaagagaatcccggtccgatggccctcccagtaactgccctccttttgcccctcgcactccttcttcatgccgctcgccccaactgggtcaacgtgattagcgatttgaagaaaatcgaggaccttatacagtctatgcatattgacgctacactgtatactgagagtgatgtacacccgtcctgtaaggtaacggccatgaaatgctttcttctggagctccaggtcatcagcttggagtctggggacgcaagcatccacgatacggttgaaaacctcatcatccttgcgaacaactctctctcatctaatggaaacgttacagagagtgggtgtaaggagtgcgaagagttggaagaaaaaaacatcaaagaatttcttcaatccttcgttcacatagtgcaaatgttcattaacacgtccactaccacacccgccccgaggccacctacgccggcaccgactatcgccagtcaacccctctctctgcgccccgaggcttgccggcctgcggctggtggggcggtccacacccggggcctggattttgcgtgcgatatatacatctgggcacctcttgccggcacctgcggagtgctgcttctctcactcgttattacgctgtactgctaa

SEQ ID NO: 3624 - DNA, 2154 bp, synthetic construct
  misc_feature 1..2154: note = Synthetic
  source 1..2154: mol_type = other DNA
atggccttaccagtgaccgccttgctcctgccgctggccttgctgctccacgccgccaggccggaggtgcagctgttggagtctgggggaggcttggtacagcctggggggtccctgagactctcctgtgcagcctctggactcacctttagcatacatactgtgggatggttccgccaggctccagggaaggaaagagagttcgtctcagctgcactgggtagtgggggtcgaccttactaccgcgactccgtgaagggccggttcaccatctccagagacaattccaagaacacgctgtatctgcaaatgaacagcctgaaaccagaggacacggccgtatattactgttatgttgacgtggggacagggctgtactatggctactggggccaagggacccaggtcaccgtctcctcaggtggaggcggttcaggcggaggtggctctggcggtggcggatcggaggtgcagctgttggagtctgggggaggcttggtacagcctggggggtccctgagactctcctgtgcagcctctggactcacctttagcatacatactgtgggatggttccgccaggctccagggaaggaaagagagttcgtctcagctgcactgggtagtgggggtcgaccttactaccgcgactccgtgaagggccggttcaccatctccagagacaattccaagaacacgctgtatctgcaaatgaacagcctgaaaccagaggacacggccgtatattactgttatgttgacgtggggacagggctgtactatggctactggggccaagggacccaggtcaccgtctcctcaaccacgacgccagcgccgcggccaccaacaccggcgcccaccatcgcgtcgcagcccctgtccctgcgcccagaggcgtgccggccagcggcggggggcgcagtgcacacgagggggctggacttcgcctgtgatatctacatctgggcgcccttggccgggacttgtggggtccttctcctgtcactggttatcaccctttactgccggagggaccagaggctgccccccgatgcccacaagccccctgggggaggcagtttccggacccccatccaagaggagcaggccgacgcccactccaccctggccaagatcagagtgaagttcagcaggagcgcagacgcccccgcgtaccagcagggccagaaccagctctataacgagctcaatctaggacgaagagaggagtacgatgttttggacaagagacgtggccgggaccctgagatggggggaaagccgagaaggaagaaccctcaggaaggcctgtacaatgaactgcagaaagataagatggcggaggcctacagtgagattgggatgaaaggcgagcgccggaggggcaaggggcacgatggcctttaccagggtctcagtacagccaccaaggacacctacgacgcccttcacatgcaggccctgccccctcgcggctctggcgagggaaggggttccctgcttacttgcggcgacgtcgaagagaatcccggtccgatggccctcccagtaactgccctccttttgcccctcgcactccttcttcatgccgctcgccccaactgggtcaacgtgattagcgatttgaagaaaatcgaggaccttatacagtctatgcatattgacgctacactgtatactgagagtgatgtacacccgtcctgtaaggtaacggccatgaaatgctttcttctggagctccaggtcatcagcttggagtctggggacgcaagcatccacgatacggttgaaaacctcatcatccttgcgaacaactctctctcatctaatggaaacgttacagagagtgggtgtaaggagtgcgaagagttggaagaaaaaaacatcaaagaatttcttcaatccttcgttcacatagtgcaaatgttcattaacacgtccactaccacacccgccccgaggccacctacgccggcaccgactatcgccagtcaacccctctctctgcgccccgaggcttgccggcctgcggctggtggggcggtccacacccggggcctggattttgcgtgcgatatatacatctgggcacctcttgccggcacctgcggagtgctgcttctctcactcgttattacgctgtactgctaa

SEQ ID NO: 3625 - DNA, 2172 bp, synthetic construct
  misc_feature 1..2172: note = Synthetic
  source 1..2172: mol_type = other DNA
atggccttaccagtgaccgccttgctcctgccgctggccttgctgctccacgccgccaggccggaggtgcagctgttggagtctgggggaggcttggtacagcctggggggtccctgagactctcctgtgcagcctctggaaggatctttagcagctattttatggggtggtttcgccaggctccagggaaggaacgggagtttgtctcagcccatattagtagcgaaggtagcacatactacagagactccgtgaagggccggttcaccatctccagagacaattccaagaacacgctgtatctgcaaatgaacagcctgaaaccagaggacacggccgtatattactgtgcggcccgcgagtacgcggatacacagcgcggcgagtacgcttactggggccaagggacccaagtcaccgtctcctcaggtggaggcggttcaggcggaggtggctctggcggtggcggatcggaggtgcagctgttggagtctgggggaggcttggtacagcctggggggtccctgagactctcctgtgcagcctctggaaggatctttagcagctattttatggggtggtttcgccaggctccagggaaggaacgggagtttgtctcagcccatattagtagcgaaggtagcacatactacagagactccgtgaagggccggttcaccatctccagagacaattccaagaacacgctgtatctgcaaatgaacagcctgaaaccagaggacacggccgtatattactgtgcggcccgcgagtacgcggatacacagcgcggcgagtacgcttactggggccaagggacccaagtcaccgtctcctcaaccacgacgccagcgccgcggccaccaacaccggcgcccaccatcgcgtcgcagcccctgtccctgcgcccagaggcgtgccggccagcggcggggggcgcagtgcacacgagggggctggacttcgcctgtgatatctacatctgggcgcccttggccgggacttgtggggtccttctcctgtcactggttatcaccctttactgccggagggaccagaggctgccccccgatgcccacaagccccctgggggaggcagtttccggacccccatccaagaggagcaggccgacgcccactccaccctggccaagatcagagtgaagttcagcaggagcgcagacgcccccgcgtaccagcagggccagaaccagctctataacgagctcaatctaggacgaagagaggagtacgatgttttggacaagagacgtggccgggaccctgagatggggggaaagccgagaaggaagaaccctcaggaaggcctgtacaatgaactgcagaaagataagatggcggaggcctacagtgagattgggatgaaaggcgagcgccggaggggcaaggggcacgatggcctttaccagggtctcagtacagccaccaaggacacctacgacgcccttcacatgcaggccctgccccctcgcggctctggcgagggaaggggttccctgcttacttgcggcgacgtcgaagagaatcccggtccgatggccctcccagtaactgccctccttttgcccctcgcactccttcttcatgccgctcgccccaactgggtcaacgtgattagcgatttgaagaaaatcgaggaccttatacagtctatgcatattgacgctacactgtatactgagagtgatgtacacccgtcctgtaaggtaacggccatgaaatgctttcttctggagctccaggtcatcagcttggagtctggggacgcaagcatccacgatacggttgaaaacctcatcatccttgcgaacaactctctctcatctaatggaaacgttacagagagtgggtgtaaggagtgcgaagagttggaagaaaaaaacatcaaagaatttcttcaatccttcgttcacatagtgcaaatgttcattaacacgtccactaccacacccgccccgaggccacctacgccggcaccgactatcgccagtcaacccctctctctgcgccccgaggcttgccggcctgcggctggtggggcggtccacacccggggcctggattttgcgtgcgatatatacatctgggcacctcttgccggcacctgcggagtgctgcttctctcactcgttattacgctgtactgctaa

SEQ ID NO: 3626 - DNA, 2142 bp, synthetic construct
  misc_feature 1..2142: note = Synthetic
  source 1..2142: mol_type = other DNA
atggccttaccagtgaccgccttgctcctgccgctggccttgctgctccacgccgccaggccggaggtgcagctgttggagtctgggggaggcttggtacagcctggggggtccctgagactctcctgtgcagcctctggatctatagtcagcagctatgccatgggctggttccgccaggctccagggaaggaaagagagttcgtctcatccgctattggaaagggtggtgtaacaatttatgcagactccgtgaagggccggttcaccatctccagagataattccaagaacacgctgtatctgcaaatgaacagcctgaagccagaggacacggccgtatattactgtgcgacagatgagtctacttaccgtgactactggggccaagggacccaggtcaccgtctcctcaggtggaggcggttcaggcggaggtggctctggcggtggcggatcggaggtgcagctgttggagtctgggggaggcttggtacagcctggggggtccctgagactctcctgtgcagcctctggatctatagtcagcagctatgccatgggctggttccgccaggctccagggaaggaaagagagttcgtctcatccgctattggaaagggtggtgtaacaatttatgcagactccgtgaagggccggttcaccatctccagagataattccaagaacacgctgtatctgcaaatgaacagcctgaagccagaggacacggccgtatattactgtgcgacagatgagtctacttaccgtgactactggggccaagggacccaggtcaccgtctcctcaaccacgacgccagcgccgcggccaccaacaccggcgcccaccatcgcgtcgcagcccctgtccctgcgcccagaggcgtgccggccagcggcggggggcgcagtgcacacgagggggctggacttcgcctgtgatatctacatctgggcgcccttggccgggacttgtggggtccttctcctgtcactggttatcaccctttactgccggagggaccagaggctgccccccgatgcccacaagccccctgggggaggcagtttccggacccccatccaagaggagcaggccgacgcccactccaccctggccaagatcagagtgaagttcagcaggagcgcagacgcccccgcgtaccagcagggccagaaccagctctataacgagctcaatctaggacgaagagaggagtacgatgttttggacaagagacgtggccgggaccctgagatggggggaaagccgagaaggaagaaccctcaggaaggcctgtacaatgaactgcagaaagataagatggcggaggcctacagtgagattgggatgaaaggcgagcgccggaggggcaaggggcacgatggcctttaccagggtctcagtacagccaccaaggacacctacgacgcccttcacatgcaggccctgccccctcgcggctctggcgagggaaggggttccctgcttacttgcggcgacgtcgaagagaatcccggtccgatggccctcccagtaactgccctccttttgcccctcgcactccttcttcatgccgctcgccccaactgggtcaacgtgattagcgatttgaagaaaatcgaggaccttatacagtctatgcatattgacgctacactgtatactgagagtgatgtacacccgtcctgtaaggtaacggccatgaaatgctttcttctggagctccaggtcatcagcttggagtctggggacgcaagcatccacgatacggttgaaaacctcatcatccttgcgaacaactctctctcatctaatggaaacgttacagagagtgggtgtaaggagtgcgaagagttggaagaaaaaaacatcaaagaatttcttcaatccttcgttcacatagtgcaaatgttcattaacacgtccactaccacacccgccccgaggccacctacgccggcaccgactatcgccagtcaacccctctctctgcgccccgaggcttgccggcctgcggctggtggggcggtccacacccggggcctggattttgcgtgcgatatatacatctgggcacctcttgccggcacctgcggagtgctgcttctctcactcgttattacgctgtactgctaa

SEQ ID NO: 3627 - DNA, 2136 bp, synthetic construct
  misc_feature 1..2136: note = Synthetic
  source 1..2136: mol_type = other DNA
atggccttaccagtgaccgccttgctcctgccgctggccttgctgctccacgccgccaggccggaggtgcagctgttggagtctgggggaggcttggtacagcctggggggtccctgagactctcctgtgcagcctctggatcactatttcaggtggagcacatcgggtggtttcgccaggctccagggaaggaaagagatttcgtctcagctcaagtcaccggtggcggttatacatactacgcagactccgtgaagggccggttcaccatctccagagacaattccaagaacacgctgtatctgcaaatgaacagcctgaaaccggaggacacggccgtatattactgttacgtacggctcgtggaagaagcatactggggccaagggacccaagtcaccgtctcctcaggtggaggcggttcaggcggaggtggctctggcggtggcggatcggaggtgcagctgttggagtctgggggaggcttggtacagcctggggggtccctgagactctcctgtgcagcctctggatcactatttcaggtggagcacatcgggtggtttcgccaggctccagggaaggaaagagatttcgtctcagctcaagtcaccggtggcggttatacatactacgcagactccgtgaagggccggttcaccatctccagagacaattccaagaacacgctgtatctgcaaatgaacagcctgaaaccggaggacacggccgtatattactgttacgtacggctcgtggaagaagcatactggggccaagggacccaagtcaccgtctcctcaaccacgacgccagcgccgcggccaccaacaccggcgcccaccatcgcgtcgcagcccctgtccctgcgcccagaggcgtgccggccagcggcggggggcgcagtgcacacgagggggctggacttcgcctgtgatatctacatctgggcgcccttggccgggacttgtggggtccttctcctgtcactggttatcaccctttactgccggagggaccagaggctgccccccgatgcccacaagccccctgggggaggcagtttccggacccccatccaagaggagcaggccgacgcccactccaccctggccaagatcagagtgaagttcagcaggagcgcagacgcccccgcgtaccagcagggccagaaccagctctataacgagctcaatctaggacgaagagaggagtacgatgttttggacaagagacgtggccgggaccctgagatggggggaaagccgagaaggaagaaccctcaggaaggcctgtacaatgaactgcagaaagataagatggcggaggcctacagtgagattgggatgaaaggcgagcgccggaggggcaaggggcacgatggcctttaccagggtctcagtacagccaccaaggacacctacgacgcccttcacatgcaggccctgccccctcgcggctctggcgagggaaggggttccctgcttacttgcggcgacgtcgaagagaatcccggtccgatggccctcccagtaactgccctccttttgcccctcgcactccttcttcatgccgctcgccccaactgggtcaacgtgattagcgatttgaagaaaatcgaggaccttatacagtctatgcatattgacgctacactgtatactgagagtgatgtacacccgtcctgtaaggtaacggccatgaaatgctttcttctggagctccaggtcatcagcttggagtctggggacgcaagcatccacgatacggttgaaaacctcatcatccttgcgaacaactctctctcatctaatggaaacgttacagagagtgggtgtaaggagtgcgaagagttggaagaaaaaaacatcaaagaatttcttcaatccttcgttcacatagtgcaaatgttcattaacacgtccactaccacacccgccccgaggccacctacgccggcaccgactatcgccagtcaacccctctctctgcgccccgaggcttgccggcctgcggctggtggggcggtccacacccggggcctggattttgcgtgcgatatatacatctgggcacctcttgccggcacctgcggagtgctgcttctctcactcgttattacgctgtactgctaa

SEQ ID NO: 3628 - DNA, 2172 bp, synthetic construct
  misc_feature 1..2172: note = Synthetic
  source 1..2172: mol_type = other DNA
atggccttaccagtgaccgccttgctcctgccgctggccttgctgctccacgccgccaggccggaggtgcagctgttggagtctgggggaggcttggtacagcctggggggtccctgagactctcctgtgcagcctctggaacaacctttgccagctctttcatgggatggttccgccaggctccagggaaggagcgcgagtttgtctcagctattgtttttccggggggtagcacatactacgcagactccgtgaagggccggttcaccatctccagagacaattccaagaacacgctgtatctgcaaatgaacagcctgaagcctgaggacacggccgtatattactgtgcggctagaagatatgagttggtggacaggctggagtacgcctactggggccaagggacccaggtcaccgtctcctcaggtggaggcggttcaggcggaggtggctctggcggtggcggatcggaggtgcagctgttggagtctgggggaggcttggtacagcctggggggtccctgagactctcctgtgcagcctctggaacaacctttgccagctctttcatgggatggttccgccaggctccagggaaggagcgcgagtttgtctcagctattgtttttccggggggtagcacatactacgcagactccgtgaagggccggttcaccatctccagagacaattccaagaacacgctgtatctgcaaatgaacagcctgaagcctgaggacacggccgtatattactgtgcggctagaagatatgagttggtggacaggctggagtacgcctactggggccaagggacccaggtcaccgtctcctcaaccacgacgccagcgccgcggccaccaacaccggcgcccaccatcgcgtcgcagcccctgtccctgcgcccagaggcgtgccggccagcggcggggggcgcagtgcacacgagggggctggacttcgcctgtgatatctacatctgggcgcccttggccgggacttgtggggtccttctcctgtcactggttatcaccctttactgccggagggaccagaggctgccccccgatgcccacaagccccctgggggaggcagtttccggacccccatccaagaggagcaggccgacgcccactccaccctggccaagatcagagtgaagttcagcaggagcgcagacgcccccgcgtaccagcagggccagaaccagctctataacgagctcaatctaggacgaagagaggagtacgatgttttggacaagagacgtggccgggaccctgagatggggggaaagccgagaaggaagaaccctcaggaaggcctgtacaatgaactgcagaaagataagatggcggaggcctacagtgagattgggatgaaaggcgagcgccggaggggcaaggggcacgatggcctttaccagggtctcagtacagccaccaaggacacctacgacgcccttcacatgcaggccctgccccctcgcggctctggcgagggaaggggttccctgcttacttgcggcgacgtcgaagagaatcccggtccgatggccctcccagtaactgccctccttttgcccctcgcactccttcttcatgccgctcgccccaactgggtcaacgtgattagcgatttgaagaaaatcgaggaccttatacagtctatgcatattgacgctacactgtatactgagagtgatgtacacccgtcctgtaaggtaacggccatgaaatgctttcttctggagctccaggtcatcagcttggagtctggggacgcaagcatccacgatacggttgaaaacctcatcatccttgcgaacaactctctctcatctaatggaaacgttacagagagtgggtgtaaggagtgcgaagagttggaagaaaaaaacatcaaagaatttcttcaatccttcgttcacatagtgcaaatgttcattaacacgtccactaccacacccgccccgaggccacctacgccggcaccgactatcgccagtcaacccctctctctgcgccccgaggcttgccggcctgcggctggtggggcggtccacacccggggcctggattttgcgtgcgatatatacatctgggcacctcttgccggcacctgcggagtgctgcttctctcactcgttattacgctgtactgctaa

SEQ ID NO: 3629 - DNA, 2142 bp, synthetic construct
  misc_feature 1..2142: note = Synthetic
  source 1..2142: mol_type = other DNA
atggccttaccagtgaccgccttgctcctgccgctggccttgctgctccacgccgccaggccggaggtgcagctgttggagtctgggggaggcttggtacagcctggggggtccctgagactctcctgtgcagcctctggaagcgtgtttagcagctttactattgggtggtttcgccaggctccagggaaggagcgcgagtttgtctcagctattgtcactagcaccggtagtacatactatgcagactccgtgaagggccggttcaccatctccagagacaattccaagaacacgctgtatctgcaaatgaacagcctgaaaccggaggacacggccgtatattactgtaatgtgaggacacaggaggactattactactggggccaagggacccaggtcaccgtctcctcaggtggaggcggttcaggcggaggtggctctggcggtggcggatcggaggtgcagctgttggagtctgggggaggcttggtacagcctggggggtccctgagactctcctgtgcagcctctggaagcgtgtttagcagctttactattgggtggtttcgccaggctccagggaaggagcgcgagtttgtctcagctattgtcactagcaccggtagtacatactatgcagactccgtgaagggccggttcaccatctccagagacaattccaagaacacgctgtatctgcaaatgaacagcctgaaaccggaggacacggccgtatattactgtaatgtgaggacacaggaggactattactactggggccaagggacccaggtcaccgtctcctcaaccacgacgccagcgccgcggccaccaacaccggcgcccaccatcgcgtcgcagcccctgtccctgcgcccagaggcgtgccggccagcggcggggggcgcagtgcacacgagggggctggacttcgcctgtgatatctacatctgggcgcccttggccgggacttgtggggtccttctcctgtcactggttatcaccctttactgccggagggaccagaggctgccccccgatgcccacaagccccctgggggaggcagtttccggacccccatccaagaggagcaggccgacgcccactccaccctggccaagatcagagtgaagttcagcaggagcgcagacgcccccgcgtaccagcagggccagaaccagctctataacgagctcaatctaggacgaagagaggagtacgatgttttggacaagagacgtggccgggaccctgagatggggggaaagccgagaaggaagaaccctcaggaaggcctgtacaatgaactgcagaaagataagatggcggaggcctacagtgagattgggatgaaaggcgagcgccggaggggcaaggggcacgatggcctttaccagggtctcagtacagccaccaaggacacctacgacgcccttcacatgcaggccctgccccctcgcggctctggcgagggaaggggttccctgcttacttgcggcgacgtcgaagagaatcccggtccgatggccctcccagtaactgccctccttttgcccctcgcactccttcttcatgccgctcgccccaactgggtcaacgtgattagcgatttgaagaaaatcgaggaccttatacagtctatgcatattgacgctacactgtatactgagagtgatgtacacccgtcctgtaaggtaacggccatgaaatgctttcttctggagctccaggtcatcagcttggagtctggggacgcaagcatccacgatacggttgaaaacctcatcatccttgcgaacaactctctctcatctaatggaaacgttacagagagtgggtgtaaggagtgcgaagagttggaagaaaaaaacatcaaagaatttcttcaatccttcgttcacatagtgcaaatgttcattaacacgtccactaccacacccgccccgaggccacctacgccggcaccgactatcgccagtcaacccctctctctgcgccccgaggcttgccggcctgcggctggtggggcggtccacacccggggcctggattttgcgtgcgatatatacatctgggcacctcttgccggcacctgcggagtgctgcttctctcactcgttattacgctgtactgctaa

SEQ ID NO: 3630 - DNA, 2172 bp, synthetic construct
  misc_feature 1..2172: note = Synthetic
  source 1..2172: mol_type = other DNA
atggccttaccagtgaccgccttgctcctgccgctggccttgctgctccacgccgccaggccggaggtgcagctgttggagtctgggggaggcttggtacagcctggggggtccctgagactctcctgtgcagcctctggaagcatttttggcagccacttcatgggctggtttcgccaggctccagggaaggagcgggagttcgtctcagctgcggttaccagcggaggtagtacatactatgcagactccgtgaagggccggttcaccatctccagagacaattccaagaacacgctgtatctgcaaatgaacagcctgaaacctgaggacacggccgtatattactgtgcggctcgaacctaccagtcaacgtatcagcctgaatatgcctactggggccaagggacccaggtcaccgtctcctcaggtggaggcggttcaggcggaggtggctctggcggtggcggatcggaggtgcagctgttggagtctgggggaggcttggtacagcctggggggtccctgagactctcctgtgcagcctctggaagcatttttggcagccacttcatgggctggtttcgccaggctccagggaaggagcgggagttcgtctcagctgcggttaccagcggaggtagtacatactatgcagactccgtgaagggccggttcaccatctccagagacaattccaagaacacgctgtatctgcaaatgaacagcctgaaacctgaggacacggccgtatattactgtgcggctcgaacctaccagtcaacgtatcagcctgaatatgcctactggggccaagggacccaggtcaccgtctcctcaaccacgacgccagcgccgcggccaccaacaccggcgcccaccatcgcgtcgcagcccctgtccctgcgcccagaggcgtgccggccagcggcggggggcgcagtgcacacgagggggctggacttcgcctgtgatatctacatctgggcgcccttggccgggacttgtggggtccttctcctgtcactggttatcaccctttactgccggagggaccagaggctgccccccgatgcccacaagccccctgggggaggcagtttccggacccccatccaagaggagcaggccgacgcccactccaccctggccaagatcagagtgaagttcagcaggagcgcagacgcccccgcgtaccagcagggccagaaccagctctataacgagctcaatctaggacgaagagaggagtacgatgttttggacaagagacgtggccgggaccctgagatggggggaaagccgagaaggaagaaccctcaggaaggcctgtacaatgaactgcagaaagataagatggcggaggcctacagtgagattgggatgaaaggcgagcgccggaggggcaaggggcacgatggcctttaccagggtctcagtacagccaccaaggacacctacgacgcccttcacatgcaggccctgccccctcgcggctctggcgagggaaggggttccctgcttacttgcggcgacgtcgaagagaatcccggtccgatggccctcccagtaactgccctccttttgcccctcgcactccttcttcatgccgctcgccccaactgggtcaacgtgattagcgatttgaagaaaatcgaggaccttatacagtctatgcatattgacgctacactgtatactgagagtgatgtacacccgtcctgtaaggtaacggccatgaaatgctttcttctggagctccaggtcatcagcttggagtctggggacgcaagcatccacgatacggttgaaaacctcatcatccttgcgaacaactctctctcatctaatggaaacgttacagagagtgggtgtaaggagtgcgaagagttggaagaaaaaaacatcaaagaatttcttcaatccttcgttcacatagtgcaaatgttcattaacacgtccactaccacacccgccccgaggccacctacgccggcaccgactatcgccagtcaacccctctctctgcgccccgaggcttgccggcctgcggctggtggggcggtccacacccggggcctggattttgcgtgcgatatatacatctgggcacctcttgccggcacctgcggagtgctgcttctctcactcgttattacgctgtactgctaa

SEQ ID NO: 3631 - DNA, 2184 bp, synthetic construct
  misc_feature 1..2184: note = Synthetic
  source 1..2184: mol_type = other DNA
atggccttaccagtgaccgccttgctcctgccgctggccttgctgctccacgccgccaggccggaggtgcagctgttggagtctgggggaggcttggtacagcctggggggtccctgagactctcctgtgcagcctctggatctatctttagcatcctggacatcgggtggttccgccaggctccagggaaggaacgagagttcgtctcagcctatattagcagcggtggtagtacatactattccgactccgtgaagggccggttcaccatctccagagataattccaagaacacgctgtatctgcaaatgaacagcctgaagccagaggacacggccgtatattactgtgtggctaccatctttggtgatcgtaccgagggccaggaaaggtacgctttctggggccaagggacccaagtcaccgtctcctcaggtggaggcggttcaggcggaggtggctctggcggtggcggatcggaggtgcagctgttggagtctgggggaggcttggtacagcctggggggtccctgagactctcctgtgcagcctctggatctatctttagcatcctggacatcgggtggttccgccaggctccagggaaggaacgagagttcgtctcagcctatattagcagcggtggtagtacatactattccgactccgtgaagggccggttcaccatctccagagataattccaagaacacgctgtatctgcaaatgaacagcctgaagccagaggacacggccgtatattactgtgtggctaccatctttggtgatcgtaccgagggccaggaaaggtacgctttctggggccaagggacccaagtcaccgtctcctcaaccacgacgccagcgccgcggccaccaacaccggcgcccaccatcgcgtcgcagcccctgtccctgcgcccagaggcgtgccggccagcggcggggggcgcagtgcacacgagggggctggacttcgcctgtgatatctacatctgggcgcccttggccgggacttgtggggtccttctcctgtcactggttatcaccctttactgccggagggaccagaggctgccccccgatgcccacaagccccctgggggaggcagtttccggacccccatccaagaggagcaggccgacgcccactccaccctggccaagatcagagtgaagttcagcaggagcgcagacgcccccgcgtaccagcagggccagaaccagctctataacgagctcaatctaggacgaagagaggagtacgatgttttggacaagagacgtggccgggaccctgagatggggggaaagccgagaaggaagaaccctcaggaaggcctgtacaatgaactgcagaaagataagatggcggaggcctacagtgagattgggatgaaaggcgagcgccggaggggcaaggggcacgatggcctttaccagggtctcagtacagccaccaaggacacctacgacgcccttcacatgcaggccctgccccctcgcggctctggcgagggaaggggttccctgcttacttgcggcgacgtcgaagagaatcccggtccgatggccctcccagtaactgccctccttttgcccctcgcactccttcttcatgccgctcgccccaactgggtcaacgtgattagcgatttgaagaaaatcgaggaccttatacagtctatgcatattgacgctacactgtatactgagagtgatgtacacccgtcctgtaaggtaacggccatgaaatgctttcttctggagctccaggtcatcagcttggagtctggggacgcaagcatccacgatacggttgaaaacctcatcatccttgcgaacaactctctctcatctaatggaaacgttacagagagtgggtgtaaggagtgcgaagagttggaagaaaaaaacatcaaagaatttcttcaatccttcgttcacatagtgcaaatgttcattaacacgtccactaccacacccgccccgaggccacctacgccggcaccgactatcgccagtcaacccctctctctgcgccccgaggcttgccggcctgcggctggtggggcggtccacacccggggcctggattttgcgtgcgatatatacatctgggcacctcttgccggcacctgcggagtgctgcttctctcactcgttattacgctgtactgctaa

SEQ ID NO: 3632 - DNA, 2172 bp, synthetic construct
  misc_feature 1..2172: note = Synthetic
  source 1..2172: mol_type = other DNA
atggccttaccagtgaccgccttgctcctgccgctggccttgctgctccacgccgccaggccggaggtgcagctgttggagtctgggggaggcttggtacagcctggggggtccctgagactctcctgtgcagcctctggaagcaccacgagcagctattttatgggatggttccgccaggctccagggaaggaacgcgagtttgtctcagctattataactagcagtggtagtccctactatgcagactccgtgaagggccggttcaccatctccagagacaattccaagaacacgctgtatctgcaaatgaacagcctgaaacccgaggacacggccgtatattactgtgcggcgcgtcggtatgggtcgagggaaacggacgactatgggtactggggccaagggacccaggtcaccgtctcctcaggtggaggcggttcaggcggaggtggctctggcggtggcggatcggaggtgcagctgttggagtctgggggaggcttggtacagcctggggggtccctgagactctcctgtgcagcctctggaagcaccacgagcagctattttatgggatggttccgccaggctccagggaaggaacgcgagtttgtctcagctattataactagcagtggtagtccctactatgcagactccgtgaagggccggttcaccatctccagagacaattccaagaacacgctgtatctgcaaatgaacagcctgaaacccgaggacacggccgtatattactgtgcggcgcgtcggtatgggtcgagggaaacggacgactatgggtactggggccaagggacccaggtcaccgtctcctcaaccacgacgccagcgccgcggccaccaacaccggcgcccaccatcgcgtcgcagcccctgtccctgcgcccagaggcgtgccggccagcggcggggggcgcagtgcacacgagggggctggacttcgcctgtgatatctacatctgggcgcccttggccgggacttgtggggtccttctcctgtcactggttatcaccctttactgccggagggaccagaggctgccccccgatgcccacaagccccctgggggaggcagtttccggacccccatccaagaggagcaggccgacgcccactccaccctggccaagatcagagtgaagttcagcaggagcgcagacgcccccgcgtaccagcagggccagaaccagctctataacgagctcaatctaggacgaagagaggagtacgatgttttggacaagagacgtggccgggaccctgagatggggggaaagccgagaaggaagaaccctcaggaaggcctgtacaatgaactgcagaaagataagatggcggaggcctacagtgagattgggatgaaaggcgagcgccggaggggcaaggggcacgatggcctttaccagggtctcagtacagccaccaaggacacctacgacgcccttcacatgcaggccctgccccctcgcggctctggcgagggaaggggttccctgcttacttgcggcgacgtcgaagagaatcccggtccgatggccctcccagtaactgccctccttttgcccctcgcactccttcttcatgccgctcgccccaactgggtcaacgtgattagcgatttgaagaaaatcgaggaccttatacagtctatgcatattgacgctacactgtatactgagagtgatgtacacccgtcctgtaaggtaacggccatgaaatgctttcttctggagctccaggtcatcagcttggagtctggggacgcaagcatccacgatacggttgaaaacctcatcatccttgcgaacaactctctctcatctaatggaaacgttacagagagtgggtgtaaggagtgcgaagagttggaagaaaaaaacatcaaagaatttcttcaatccttcgttcacatagtgcaaatgttcattaacacgtccactaccacacccgccccgaggccacctacgccggcaccgactatcgccagtcaacccctctctctgcgccccgaggcttgccggcctgcggctggtggggcggtccacacccggggcctggattttgcgtgcgatatatacatctgggcacctcttgccggcacctgcggagtgctgcttctctcactcgttattacgctgtactgctaa

SEQ ID NO: 3633 - DNA, 2178 bp, synthetic construct
  misc_feature 1..2178: note = Synthetic
  source 1..2178: mol_type = other DNA
atggccttaccagtgaccgccttgctcctgccgctggccttgctgctccacgccgccaggccggaggtgcagctgttggagtctgggggaggcttggtacagcctggggggtccctgagactctcctgtgcagcctctggatctgtctttagcagctatagcatgtggtttcgccaggctccagggaaggaacgcgagtttgtctcagctattatcactagtggcggtagcacatactacgcagactccgtgaagggccggttcaccatctccagagacaattccaagaacacgctgtatctgcaaatgaacagcctgaaacccgaggacacggccgtatattactgtgtggccgtttacggcataggaactggacaatacatcggtacatatgacatctggggccaagggacccaggtcaccgtctcctcaggtggaggcggttcaggcggaggtggctctggcggtggcggatcggaggtgcagctgttggagtctgggggaggcttggtacagcctggggggtccctgagactctcctgtgcagcctctggatctgtctttagcagctatagcatgtggtttcgccaggctccagggaaggaacgcgagtttgtctcagctattatcactagtggcggtagcacatactacgcagactccgtgaagggccggttcaccatctccagagacaattccaagaacacgctgtatctgcaaatgaacagcctgaaacccgaggacacggccgtatattactgtgtggccgtttacggcataggaactggacaatacatcggtacatatgacatctggggccaagggacccaggtcaccgtctcctcaaccacgacgccagcgccgcggccaccaacaccggcgcccaccatcgcgtcgcagcccctgtccctgcgcccagaggcgtgccggccagcggcggggggcgcagtgcacacgagggggctggacttcgcctgtgatatctacatctgggcgcccttggccgggacttgtggggtccttctcctgtcactggttatcaccctttactgccggagggaccagaggctgccccccgatgcccacaagccccctgggggaggcagtttccggacccccatccaagaggagcaggccgacgcccactccaccctggccaagatcagagtgaagttcagcaggagcgcagacgcccccgcgtaccagcagggccagaaccagctctataacgagctcaatctaggacgaagagaggagtacgatgttttggacaagagacgtggccgggaccctgagatggggggaaagccgagaaggaagaaccctcaggaaggcctgtacaatgaactgcagaaagataagatggcggaggcctacagtgagattgggatgaaaggcgagcgccggaggggcaaggggcacgatggcctttaccagggtctcagtacagccaccaaggacacctacgacgcccttcacatgcaggccctgccccctcgcggctctggcgagggaaggggttccctgcttacttgcggcgacgtcgaagagaatcccggtccgatggccctcccagtaactgccctccttttgcccctcgcactccttcttcatgccgctcgccccaactgggtcaacgtgattagcgatttgaagaaaatcgaggaccttatacagtctatgcatattgacgctacactgtatactgagagtgatgtacacccgtcctgtaaggtaacggccatgaaatgctttcttctggagctccaggtcatcagcttggagtctggggacgcaagcatccacgatacggttgaaaacctcatcatccttgcgaacaactctctctcatctaatggaaacgttacagagagtgggtgtaaggagtgcgaagagttggaagaaaaaaacatcaaagaatttcttcaatccttcgttcacatagtgcaaatgttcattaacacgtccactaccacacccgccccgaggccacctacgccggcaccgactatcgccagtcaacccctctctctgcgccccgaggcttgccggcctgcggctggtggggcggtccacacccggggcctggattttgcgtgcgatatatacatctgggcacctcttgccggcacctgcggagtgctgcttctctcactcgttattacgctgtactgctaa

SEQ ID NO: 3634 - DNA, 2166 bp, synthetic construct
  misc_feature 1..2166: note = Synthetic
  source 1..2166: mol_type = other DNA
atggccttaccagtgaccgccttgctcctgccgctggccttgctgctccacgccgccaggccggaggtgcagctgttggagtctgggggaggcttggtacagcctggggggtccctgagactctcctgtgcagcctctggatccctactgagcatttatgatatgggctggtttcgccaggctccagggaaggagcgagagttcgtctcagcccgtattggcaaaggtggtagtacatactatgcagactccgtgaagggccggttcaccatctccagagataattccaagaacacgctgtatctgcaaatgaacagcctgaaaccggaggacacggccgtatattactgtgcggttctggttggtgagggtgaatcttacggctatcactactggggccaagggacccaggtcaccgtctcctcaggtggaggcggttcaggcggaggtggctctggcggtggcggatcggaggtgcagctgttggagtctgggggaggcttggtacagcctggggggtccctgagactctcctgtgcagcctctggatccctactgagcatttatgatatgggctggtttcgccaggctccagggaaggagcgagagttcgtctcagcccgtattggcaaaggtggtagtacatactatgcagactccgtgaagggccggttcaccatctccagagataattccaagaacacgctgtatctgcaaatgaacagcctgaaaccggaggacacggccgtatattactgtgcggttctggttggtgagggtgaatcttacggctatcactactggggccaagggacccaggtcaccgtctcctcaaccacgacgccagcgccgcggccaccaacaccggcgcccaccatcgcgtcgcagcccctgtccctgcgcccagaggcgtgccggccagcggcggggggcgcagtgcacacgagggggctggacttcgcctgtgatatctacatctgggcgcccttggccgggacttgtggggtccttctcctgtcactggttatcaccctttactgccggagggaccagaggctgccccccgatgcccacaagccccctgggggaggcagtttccggacccccatccaagaggagcaggccgacgcccactccaccctggccaagatcagagtgaagttcagcaggagcgcagacgcccccgcgtaccagcagggccagaaccagctctataacgagctcaatctaggacgaagagaggagtacgatgttttggacaagagacgtggccgggaccctgagatggggggaaagccgagaaggaagaaccctcaggaaggcctgtacaatgaactgcagaaagataagatggcggaggcctacagtgagattgggatgaaaggcgagcgccggaggggcaaggggcacgatggcctttaccagggtctcagtacagccaccaaggacacctacgacgcccttcacatgcaggccctgccccctcgcggctctggcgagggaaggggttccctgcttacttgcggcgacgtcgaagagaatcccggtccgatggccctcccagtaactgccctccttttgcccctcgcactccttcttcatgccgctcgccccaactgggtcaacgtgattagcgatttgaagaaaatcgaggaccttatacagtctatgcatattgacgctacactgtatactgagagtgatgtacacccgtcctgtaaggtaacggccatgaaatgctttcttctggagctccaggtcatcagcttggagtctggggacgcaagcatccacgatacggttgaaaacctcatcatccttgcgaacaactctctctcatctaatggaaacgttacagagagtgggtgtaaggagtgcgaagagttggaagaaaaaaacatcaaagaatttcttcaatccttcgttcacatagtgcaaatgttcattaacacgtccactaccacacccgccccgaggccacctacgccggcaccgactatcgccagtcaacccctctctctgcgccccgaggcttgccggcctgcggctggtggggcggtccacacccggggcctggattttgcgtgcgatatatacatctgggcacctcttgccggcacctgcggagtgctgcttctctcactcgttattacgctgtactgctaa

SEQ ID NO: 3635 - DNA, 2178 bp, synthetic construct
  misc_feature 1..2178: note = Synthetic
  source 1..2178: mol_type = other DNA
atggccttaccagtgaccgccttgctcctgccgctggccttgctgctccacgccgccaggccggaggtgcagctgttggagtctgggggaggcttggtacagcctggggggtccctgagactctcctgtgcagcctctggaattggcctgagcatatatttcatgggatggtttcgccaggctccagggaaggagcgcgagtttgtctcagctattattagttctagtggtagcacatactacgcagactccgtgaagggccggttcaccatctccagagacaattccaagaacacgctgtatctgcaaatgaacagcctgaagccagaggacacggccgtatattactgtgcggctcgaaccggctactctgaatacgagcaggaagactatggctactggggccaagggacccaagtcaccgtctcctcaggtggaggcggttcaggcggaggtggctctggcggtggcggatcggaggtgcagctgttggagtctgggggaggcttggtacagcctggggggtccctgagactctcctgtgcagcctctggaattggcctgagcatatatttcatgggatggtttcgccaggctccagggaaggagcgcgagtttgtctcagctattattagttctagtggtagcacatactacgcagactccgtgaagggccggttcaccatctccagagacaattccaagaacacgctgtatctgcaaatgaacagcctgaagccagaggacacggccgtatattactgtgcggctcgaaccggctactctgaatacgagcaggaagactatggctactggggccaagggacccaagtcaccgtctcctcaaccacgacgccagcgccgcggccaccaacaccggcgcccaccatcgcgtcgcagcccctgtccctgcgcccagaggcgtgccggccagcggcggggggcgcagtgcacacgagggggctggacttcgcctgtgatatctacatctgggcgcccttggccgggacttgtggggtccttctcctgtcactggttatcaccctttactgccggagggaccagaggctgccccccgatgcccacaagccccctgggggaggcagtttccggacccccatccaagaggagcaggccgacgcccactccaccctggccaagatcagagtgaagttcagcaggagcgcagacgcccccgcgtaccagcagggccagaaccagctctataacgagctcaatctaggacgaagagaggagtacgatgttttggacaagagacgtggccgggaccctgagatggggggaaagccgagaaggaagaaccctcaggaaggcctgtacaatgaactgcagaaagataagatggcggaggcctacagtgagattgggatgaaaggcgagcgccggaggggcaaggggcacgatggcctttaccagggtctcagtacagccaccaaggacacctacgacgcccttcacatgcaggccctgccccctcgcggctctggcgagggaaggggttccctgcttacttgcggcgacgtcgaagagaatcccggtccgatggccctcccagtaactgccctccttttgcccctcgcactccttcttcatgccgctcgccccaactgggtcaacgtgattagcgatttgaagaaaatcgaggaccttatacagtctatgcatattgacgctacactgtatactgagagtgatgtacacccgtcctgtaaggtaacggccatgaaatgctttcttctggagctccaggtcatcagcttggagtctggggacgcaagcatccacgatacggttgaaaacctcatcatccttgcgaacaactctctctcatctaatggaaacgttacagagagtgggtgtaaggagtgcgaagagttggaagaaaaaaacatcaaagaatttcttcaatccttcgttcacatagtgcaaatgttcattaacacgtccactaccacacccgccccgaggccacctacgccggcaccgactatcgccagtcaacccctctctctgcgccccgaggcttgccggcctgcggctggtggggcggtccacacccggggcctggattttgcgtgcgatatatacatctgggcacctcttgccggcacctgcggagtgctgcttctctcactcgttattacgctgtactgctaa

SEQ ID NO: 3636 - DNA, 2172 bp, synthetic construct
  misc_feature 1..2172: note = Synthetic
  source 1..2172: mol_type = other DNA
atggccttaccagtgaccgccttgctcctgccgctggccttgctgctccacgccgccaggccggaggtgcagctgttggagtctgggggaggcttggtacagcctggggggtccctgagactctcctgtgcagcctctggaagcatttttagcagctccttcatcggatggttccgccaggctccagggaaggagcgggagtttgtctcagctgtcattgctagcagtggtagtacatactatgcagactccgtgaagggccggttcaccatctccagagacaattccaagaacacgctgtatctgcaaatgaacagcctgaaaccagaggacacggccgtatattactgtgcgggccggttcgggcaggggggggggaccgtggaatatggctactggggccaagggacccaagtcaccgtctcctcaggtggaggcggttcaggcggaggtggctctggcggtggcggatcggaggtgcagctgttggagtctgggggaggcttggtacagcctggggggtccctgagactctcctgtgcagcctctggaagcatttttagcagctccttcatcggatggttccgccaggctccagggaaggagcgggagtttgtctcagctgtcattgctagcagtggtagtacatactatgcagactccgtgaagggccggttcaccatctccagagacaattccaagaacacgctgtatctgcaaatgaacagcctgaaaccagaggacacggccgtatattactgtgcgggccggttcgggcaggggggggggaccgtggaatatggctactggggccaagggacccaagtcaccgtctcctcaaccacgacgccagcgccgcggccaccaacaccggcgcccaccatcgcgtcgcagcccctgtccctgcgcccagaggcgtgccggccagcggcggggggcgcagtgcacacgagggggctggacttcgcctgtgatatctacatctgggcgcccttggccgggacttgtggggtccttctcctgtcactggttatcaccctttactgccggagggaccagaggctgccccccgatgcccacaagccccctgggggaggcagtttccggacccccatccaagaggagcaggccgacgcccactccaccctggccaagatcagagtgaagttcagcaggagcgcagacgcccccgcgtaccagcagggccagaaccagctctataacgagctcaatctaggacgaagagaggagtacgatgttttggacaagagacgtggccgggaccctgagatggggggaaagccgagaaggaagaaccctcaggaaggcctgtacaatgaactgcagaaagataagatggcggaggcctacagtgagattgggatgaaaggcgagcgccggaggggcaaggggcacgatggcctttaccagggtctcagtacagccaccaaggacacctacgacgcccttcacatgcaggccctgccccctcgcggctctggcgagggaaggggttccctgcttacttgcggcgacgtcgaagagaatcccggtccgatggccctcccagtaactgccctccttttgcccctcgcactccttcttcatgccgctcgccccaactgggtcaacgtgattagcgatttgaagaaaatcgaggaccttatacagtctatgcatattgacgctacactgtatactgagagtgatgtacacccgtcctgtaaggtaacggccatgaaatgctttcttctggagctccaggtcatcagcttggagtctggggacgcaagcatccacgatacggttgaaaacctcatcatccttgcgaacaactctctctcatctaatggaaacgttacagagagtgggtgtaaggagtgcgaagagttggaagaaaaaaacatcaaagaatttcttcaatccttcgttcacatagtgcaaatgttcattaacacgtccactaccacacccgccccgaggccacctacgccggcaccgactatcgccagtcaacccctctctctgcgccccgaggcttgccggcctgcggctggtggggcggtccacacccggggcctggattttgcgtgcgatatatacatctgggcacctcttgccggcacctgcggagtgctgcttctctcactcgttattacgctgtactgctaa

SEQ ID NO: 3637 - DNA, 2172 bp, synthetic construct
  misc_feature 1..2172: note = Synthetic
  source 1..2172: mol_type = other DNA
atggccttaccagtgaccgccttgctcctgccgctggccttgctgctccacgccgccaggccggaggtgcagctgttggagtctgggggaggcttggtacagcctggggggtccctgagactctcctgtgcagcctctggacgagtgtttagcttctattttatggggtggttccgccaggctccagggaaggaaagggagttcgtcagtggcgttattggcaaaaccggtagtacatactatactgactccgtgaagggccggttcaccatctccagagataattccaagaacacgctgtatctgcaaatgaacagcctgaaacccgaggacacggccgtatattactgtgcggccagtgaataccaaggtaccgggtacggagaatttgcatactggggccaagggacccaggtcaccgtctcctcaggtggaggcggttcaggcggaggtggctctggcggtggcggatcggaggtgcagctgttggagtctgggggaggcttggtacagcctggggggtccctgagactctcctgtgcagcctctggacgagtgtttagcttctattttatggggtggttccgccaggctccagggaaggaaagggagttcgtcagtggcgttattggcaaaaccggtagtacatactatactgactccgtgaagggccggttcaccatctccagagataattccaagaacacgctgtatctgcaaatgaacagcctgaaacccgaggacacggccgtatattactgtgcggccagtgaataccaaggtaccgggtacggagaatttgcatactggggccaagggacccaggtcaccgtctcctcaaccacgacgccagcgccgcggccaccaacaccggcgcccaccatcgcgtcgcagcccctgtccctgcgcccagaggcgtgccggccagcggcggggggcgcagtgcacacgagggggctggacttcgcctgtgatatctacatctgggcgcccttggccgggacttgtggggtccttctcctgtcactggttatcaccctttactgccggagggaccagaggctgccccccgatgcccacaagccccctgggggaggcagtttccggacccccatccaagaggagcaggccgacgcccactccaccctggccaagatcagagtgaagttcagcaggagcgcagacgcccccgcgtaccagcagggccagaaccagctctataacgagctcaatctaggacgaagagaggagtacgatgttttggacaagagacgtggccgggaccctgagatggggggaaagccgagaaggaagaaccctcaggaaggcctgtacaatgaactgcagaaagataagatggcggaggcctacagtgagattgggatgaaaggcgagcgccggaggggcaaggggcacgatggcctttaccagggtctcagtacagccaccaaggacacctacgacgcccttcacatgcaggccctgccccctcgcggctctggcgagggaaggggttccctgcttacttgcggcgacgtcgaagagaatcccggtccgatggccctcccagtaactgccctccttttgcccctcgcactccttcttcatgccgctcgccccaactgggtcaacgtgattagcgatttgaagaaaatcgaggaccttatacagtctatgcatattgacgctacactgtatactgagagtgatgtacacccgtcctgtaaggtaacggccatgaaatgctttcttctggagctccaggtcatcagcttggagtctggggacgcaagcatccacgatacggttgaaaacctcatcatccttgcgaacaactctctctcatctaatggaaacgttacagagagtgggtgtaaggagtgcgaagagttggaagaaaaaaacatcaaagaatttcttcaatccttcgttcacatagtgcaaatgttcattaacacgtccactaccacacccgccccgaggccacctacgccggcaccgactatcgccagtcaacccctctctctgcgccccgaggcttgccggcctgcggctggtggggcggtccacacccggggcctggattttgcgtgcgatatatacatctgggcacctcttgccggcacctgcggagtgctgcttctctcactcgttattacgctgtactgctaa

SEQ ID NO: 3638 - DNA, 2136 bp, synthetic construct
  misc_feature 1..2136: note = Synthetic
  source 1..2136: mol_type = other DNA
atggccttaccagtgaccgccttgctcctgccgctggccttgctgctccacgccgccaggccggaggtgcagctgttggagtctgggggaggcttggtacagcctggggggtccctgagactctcctgtgcagcctctggaagtttgtttgaagtcgaacacatcggatggttccgccaggctccagggaaggagagggagtttgtctcagctcaagtgaccggtggcggttatacatactacgcagactccgtgaagggccggttcaccatctccagagacaattccaagaacacgctgtatctgcaaatgaacagcctgaaaccggaggacacggccgtatattactgttacgtccggcttgtggaggaagcctactggggccaagggacccaagtcaccgtctcctcaggtggaggcggttcaggcggaggtggctctggcggtggcggatcggaggtgcagctgttggagtctgggggaggcttggtacagcctggggggtccctgagactctcctgtgcagcctctggaagtttgtttgaagtcgaacacatcggatggttccgccaggctccagggaaggagagggagtttgtctcagctcaagtgaccggtggcggttatacatactacgcagactccgtgaagggccggttcaccatctccagagacaattccaagaacacgctgtatctgcaaatgaacagcctgaaaccggaggacacggccgtatattactgttacgtccggcttgtggaggaagcctactggggccaagggacccaagtcaccgtctcctcaaccacgacgccagcgccgcggccaccaacaccggcgcccaccatcgcgtcgcagcccctgtccctgcgcccagaggcgtgccggccagcggcggggggcgcagtgcacacgagggggctggacttcgcctgtgatatctacatctgggcgcccttggccgggacttgtggggtccttctcctgtcactggttatcaccctttactgccggagggaccagaggctgccccccgatgcccacaagccccctgggggaggcagtttccggacccccatccaagaggagcaggccgacgcccactccaccctggccaagatcagagtgaagttcagcaggagcgcagacgcccccgcgtaccagcagggccagaaccagctctataacgagctcaatctaggacgaagagaggagtacgatgttttggacaagagacgtggccgggaccctgagatggggggaaagccgagaaggaagaaccctcaggaaggcctgtacaatgaactgcagaaagataagatggcggaggcctacagtgagattgggatgaaaggcgagcgccggaggggcaaggggcacgatggcctttaccagggtctcagtacagccaccaaggacacctacgacgcccttcacatgcaggccctgccccctcgcggctctggcgagggaaggggttccctgcttacttgcggcgacgtcgaagagaatcccggtccgatggccctcccagtaactgccctccttttgcccctcgcactccttcttcatgccgctcgccccaactgggtcaacgtgattagcgatttgaagaaaatcgaggaccttatacagtctatgcatattgacgctacactgtatactgagagtgatgtacacccgtcctgtaaggtaacggccatgaaatgctttcttctggagctccaggtcatcagcttggagtctggggacgcaagcatccacgatacggttgaaaacctcatcatccttgcgaacaactctctctcatctaatggaaacgttacagagagtgggtgtaaggagtgcgaagagttggaagaaaaaaacatcaaagaatttcttcaatccttcgttcacatagtgcaaatgttcattaacacgtccactaccacacccgccccgaggccacctacgccggcaccgactatcgccagtcaacccctctctctgcgccccgaggcttgccggcctgcggctggtggggcggtccacacccggggcctggattttgcgtgcgatatatacatctgggcacctcttgccggcacctgcggagtgctgcttctctcactcgttattacgctgtactgctaa

SEQ ID NO: 3639 - DNA, 2184 bp, synthetic construct
  misc_feature 1..2184: note = Synthetic
  source 1..2184: mol_type = other DNA
atggccttaccagtgaccgccttgctcctgccgctggccttgctgctccacgccgccaggccggaggtgcagctgttggagtctgggggaggcttggtacagcctggggggtccctgagactctcctgtgcagcctctggacggatttttggagagtattttatcggatggttccgccaggctccagggaaggagcgggagttcgtctcagctattatcaccggcagtggtattacacactacgcagactccgtgaagggccggttcaccatctccagagacaattccaagaacacgctgtatctgcaaatgaacagcctgaaaccggaggacacggccgtatattactgtgcggcgcgcacagactacactacaggccaggaactaccagaatacgggtactggggccaagggacccaggtcaccgtctcctcaggtggaggcggttcaggcggaggtggctctggcggtggcggatcggaggtgcagctgttggagtctgggggaggcttggtacagcctggggggtccctgagactctcctgtgcagcctctggacggatttttggagagtattttatcggatggttccgccaggctccagggaaggagcgggagttcgtctcagctattatcaccggcagtggtattacacactacgcagactccgtgaagggccggttcaccatctccagagacaattccaagaacacgctgtatctgcaaatgaacagcctgaaaccggaggacacggccgtatattactgtgcggcgcgcacagactacactacaggccaggaactaccagaatacgggtactggggccaagggacccaggtcaccgtctcctcaaccacgacgccagcgccgcggccaccaacaccggcgcccaccatcgcgtcgcagcccctgtccctgcgcccagaggcgtgccggccagcggcggggggcgcagtgcacacgagggggctggacttcgcctgtgatatctacatctgggcgcccttggccgggacttgtggggtccttctcctgtcactggttatcaccctttactgccggagggaccagaggctgccccccgatgcccacaagccccctgggggaggcagtttccggacccccatccaagaggagcaggccgacgcccactccaccctggccaagatcagagtgaagttcagcaggagcgcagacgcccccgcgtaccagcagggccagaaccagctctataacgagctcaatctaggacgaagagaggagtacgatgttttggacaagagacgtggccgggaccctgagatggggggaaagccgagaaggaagaaccctcaggaaggcctgtacaatgaactgcagaaagataagatggcggaggcctacagtgagattgggatgaaaggcgagcgccggaggggcaaggggcacgatggcctttaccagggtctcagtacagccaccaaggacacctacgacgcccttcacatgcaggccctgccccctcgcggctctggcgagggaaggggttccctgcttacttgcggcgacgtcgaagagaatcccggtccgatggccctcccagtaactgccctccttttgcccctcgcactccttcttcatgccgctcgccccaactgggtcaacgtgattagcgatttgaagaaaatcgaggaccttatacagtctatgcatattgacgctacactgtatactgagagtgatgtacacccgtcctgtaaggtaacggccatgaaatgctttcttctggagctccaggtcatcagcttggagtctggggacgcaagcatccacgatacggttgaaaacctcatcatccttgcgaacaactctctctcatctaatggaaacgttacagagagtgggtgtaaggagtgcgaagagttggaagaaaaaaacatcaaagaatttcttcaatccttcgttcacatagtgcaaatgttcattaacacgtccactaccacacccgccccgaggccacctacgccggcaccgactatcgccagtcaacccctctctctgcgccccgaggcttgccggcctgcggctggtggggcggtccacacccggggcctggattttgcgtgcgatatatacatctgggcacctcttgccggcacctgcggagtgctgcttctctcactcgttattacgctgtactgctaa

SEQ ID NO: 3640 - DNA, 2154 bp, synthetic construct
  misc_feature 1..2154: note = Synthetic
  source 1..2154: mol_type = other DNA
atggccttaccagtgaccgccttgctcctgccgctggccttgctgctccacgccgccaggccggaggtgcagctgttggagtctgggggaggcttggtacagcctggggggtccctgagactctcctgtgcagcctctggatcaattgagagcatttatttcatcgggtggtttcgccaggctccagggaaggagagagagtttgtctcagctgaattcatcccaggaggtagcacagtgtactcagactccgtgaagggccggttcaccatctccagagacaattccaagaacacgctgtatctgcaaatgaacagcctgaaacccgaggacacggccgtatattactgtaacgccggcctagacgaagggcggtactacacctactggggccaagggacccaggtcaccgtctcctcaggtggaggcggttcaggcggaggtggctctggcggtggcggatcggaggtgcagctgttggagtctgggggaggcttggtacagcctggggggtccctgagactctcctgtgcagcctctggatcaattgagagcatttatttcatcgggtggtttcgccaggctccagggaaggagagagagtttgtctcagctgaattcatcccaggaggtagcacagtgtactcagactccgtgaagggccggttcaccatctccagagacaattccaagaacacgctgtatctgcaaatgaacagcctgaaacccgaggacacggccgtatattactgtaacgccggcctagacgaagggcggtactacacctactggggccaagggacccaggtcaccgtctcctcaaccacgacgccagcgccgcggccaccaacaccggcgcccaccatcgcgtcgcagcccctgtccctgcgcccagaggcgtgccggccagcggcggggggcgcagtgcacacgagggggctggacttcgcctgtgatatctacatctgggcgcccttggccgggacttgtggggtccttctcctgtcactggttatcaccctttactgccggagggaccagaggctgccccccgatgcccacaagccccctgggggaggcagtttccggacccccatccaagaggagcaggccgacgcccactccaccctggccaagatcagagtgaagttcagcaggagcgcagacgcccccgcgtaccagcagggccagaaccagctctataacgagctcaatctaggacgaagagaggagtacgatgttttggacaagagacgtggccgggaccctgagatggggggaaagccgagaaggaagaaccctcaggaaggcctgtacaatgaactgcagaaagataagatggcggaggcctacagtgagattgggatgaaaggcgagcgccggaggggcaaggggcacgatggcctttaccagggtctcagtacagccaccaaggacacctacgacgcccttcacatgcaggccctgccccctcgcggctctggcgagggaaggggttccctgcttacttgcggcgacgtcgaagagaatcccggtccgatggccctcccagtaactgccctccttttgcccctcgcactccttcttcatgccgctcgccccaactgggtcaacgtgattagcgatttgaagaaaatcgaggaccttatacagtctatgcatattgacgctacactgtatactgagagtgatgtacacccgtcctgtaaggtaacggccatgaaatgctttcttctggagctccaggtcatcagcttggagtctggggacgcaagcatccacgatacggttgaaaacctcatcatccttgcgaacaactctctctcatctaatggaaacgttacagagagtgggtgtaaggagtgcgaagagttggaagaaaaaaacatcaaagaatttcttcaatccttcgttcacatagtgcaaatgttcattaacacgtccactaccacacccgccccgaggccacctacgccggcaccgactatcgccagtcaacccctctctctgcgccccgaggcttgccggcctgcggctggtggggcggtccacacccggggcctggattttgcgtgcgatatatacatctgggcacctcttgccggcacctgcggagtgctgcttctctcactcgttattacgctgtactgctaa

SEQ ID NO: 3641 - DNA, 2136 bp, synthetic construct
  misc_feature 1..2136: note = Synthetic
  source 1..2136: mol_type = other DNA
atggccttaccagtgaccgccttgctcctgccgctggccttgctgctccacgccgccaggccggaggtgcagctgttggagtctgggggaggcttggtacagcctggggggtccctgagactctcctgtgcagcctctggaatagaggtcagcagcagtgtagtgggttggtttcgccaggctccagggaaggagcgggagtttgtctcagctagcggtgtgggaggtagcacatactacgcagactccgtgaagggccggttcaccatctccagagacaattccaagaacacgctgtatctgcaaatgaacagcctgaagcctgaggacacggccgtatattactgttatgcagtgtacttgaccatctacacctactggggccaagggacccaggtcaccgtctcctcaggtggaggcggttcaggcggaggtggctctggcggtggcggatcggaggtgcagctgttggagtctgggggaggcttggtacagcctggggggtccctgagactctcctgtgcagcctctggaatagaggtcagcagcagtgtagtgggttggtttcgccaggctccagggaaggagcgggagtttgtctcagctagcggtgtgggaggtagcacatactacgcagactccgtgaagggccggttcaccatctccagagacaattccaagaacacgctgtatctgcaaatgaacagcctgaagcctgaggacacggccgtatattactgttatgcagtgtacttgaccatctacacctactggggccaagggacccaggtcaccgtctcctcaaccacgacgccagcgccgcggccaccaacaccggcgcccaccatcgcgtcgcagcccctgtccctgcgcccagaggcgtgccggccagcggcggggggcgcagtgcacacgagggggctggacttcgcctgtgatatctacatctgggcgcccttggccgggacttgtggggtccttctcctgtcactggttatcaccctttactgccggagggaccagaggctgccccccgatgcccacaagccccctgggggaggcagtttccggacccccatccaagaggagcaggccgacgcccactccaccctggccaagatcagagtgaagttcagcaggagcgcagacgcccccgcgtaccagcagggccagaaccagctctataacgagctcaatctaggacgaagagaggagtacgatgttttggacaagagacgtggccgggaccctgagatggggggaaagccgagaaggaagaaccctcaggaaggcctgtacaatgaactgcagaaagataagatggcggaggcctacagtgagattgggatgaaaggcgagcgccggaggggcaaggggcacgatggcctttaccagggtctcagtacagccaccaaggacacctacgacgcccttcacatgcaggccctgccccctcgcggctctggcgagggaaggggttccctgcttacttgcggcgacgtcgaagagaatcccggtccgatggccctcccagtaactgccctccttttgcccctcgcactccttcttcatgccgctcgccccaactgggtcaacgtgattagcgatttgaagaaaatcgaggaccttatacagtctatgcatattgacgctacactgtatactgagagtgatgtacacccgtcctgtaaggtaacggccatgaaatgctttcttctggagctccaggtcatcagcttggagtctggggacgcaagcatccacgatacggttgaaaacctcatcatccttgcgaacaactctctctcatctaatggaaacgttacagagagtgggtgtaaggagtgcgaagagttggaagaaaaaaacatcaaagaatttcttcaatccttcgttcacatagtgcaaatgttcattaacacgtccactaccacacccgccccgaggccacctacgccggcaccgactatcgccagtcaacccctctctctgcgccccgaggcttgccggcctgcggctggtggggcggtccacacccggggcctggattttgcgtgcgatatatacatctgggcacctcttgccggcacctgcggagtgctgcttctctcactcgttattacgctgtactgctaa

SEQ ID NO: 3642 - DNA, 2142 bp, synthetic construct
  misc_feature 1..2142: note = Synthetic
  source 1..2142: mol_type = other DNA
atggccttaccagtgaccgccttgctcctgccgctggccttgctgctccacgccgccaggccggaggtgcagctgttggagtctgggggaggcttggtacagcctggggggtccctgagactctcctgtgcagcctctggattcaccatcagcagatatgccatggcatggtttcgccaggctccagggaaggaacgcgagttcgtcagtgggagcattttcgttggtggtggcacatactatagggactccgtgaagggccggttcaccatctccagagataattccaagaacacgctgtatctgcaaatgaacagcctgaaacctgaggacacggccgtatattactgttatgccaccgtgggtgactcctattattactggggccaagggacccaggtcaccgtctcctcaggtggaggcggttcaggcggaggtggctctggcggtggcggatcggaggtgcagctgttggagtctgggggaggcttggtacagcctggggggtccctgagactctcctgtgcagcctctggattcaccatcagcagatatgccatggcatggtttcgccaggctccagggaaggaacgcgagttcgtcagtgggagcattttcgttggtggtggcacatactatagggactccgtgaagggccggttcaccatctccagagataattccaagaacacgctgtatctgcaaatgaacagcctgaaacctgaggacacggccgtatattactgttatgccaccgtgggtgactcctattattactggggccaagggacccaggtcaccgtctcctcaaccacgacgccagcgccgcggccaccaacaccggcgcccaccatcgcgtcgcagcccctgtccctgcgcccagaggcgtgccggccagcggcggggggcgcagtgcacacgagggggctggacttcgcctgtgatatctacatctgggcgcccttggccgggacttgtggggtccttctcctgtcactggttatcaccctttactgccggagggaccagaggctgccccccgatgcccacaagccccctgggggaggcagtttccggacccccatccaagaggagcaggccgacgcccactccaccctggccaagatcagagtgaagttcagcaggagcgcagacgcccccgcgtaccagcagggccagaaccagctctataacgagctcaatctaggacgaagagaggagtacgatgttttggacaagagacgtggccgggaccctgagatggggggaaagccgagaaggaagaaccctcaggaaggcctgtacaatgaactgcagaaagataagatggcggaggcctacagtgagattgggatgaaaggcgagcgccggaggggcaaggggcacgatggcctttaccagggtctcagtacagccaccaaggacacctacgacgcccttcacatgcaggccctgccccctcgcggctctggcgagggaaggggttccctgcttacttgcggcgacgtcgaagagaatcccggtccgatggccctcccagtaactgccctccttttgcccctcgcactccttcttcatgccgctcgccccaactgggtcaacgtgattagcgatttgaagaaaatcgaggaccttatacagtctatgcatattgacgctacactgtatactgagagtgatgtacacccgtcctgtaaggtaacggccatgaaatgctttcttctggagctccaggtcatcagcttggagtctggggacgcaagcatccacgatacggttgaaaacctcatcatccttgcgaacaactctctctcatctaatggaaacgttacagagagtgggtgtaaggagtgcgaagagttggaagaaaaaaacatcaaagaatttcttcaatccttcgttcacatagtgcaaatgttcattaacacgtccactaccacacccgccccgaggccacctacgccggcaccgactatcgccagtcaacccctctctctgcgccccgaggcttgccggcctgcggctggtggggcggtccacacccggggcctggattttgcgtgcgatatatacatctgggcacctcttgccggcacctgcggagtgctgcttctctcactcgttattacgctgtactgctaa

SEQ ID NO: 3643 - DNA, 2136 bp, synthetic construct
  misc_feature 1..2136: note = Synthetic
  source 1..2136: mol_type = other DNA
atggccttaccagtgaccgccttgctcctgccgctggccttgctgctccacgccgccaggccggaggtgcagctgttggagtctgggggaggcttggtacagcctggggggtccctgagactctcctgtgcagcctctggaagcctgtttagcgttgagcacatcggctggttccgccaggctccagggaaggagagagagtttgtctcagctcaggtaaccggtgggggttatacatactacgcagactccgtgaagggccggttcaccatctccagagacaattccaagaacacgctgtatctgcaaatgaacagcctgaaaccagaggacacggccgtatattactgttatgttagacttgtggaggaagcttactggggccaagggacccaggtcaccgtctcctcaggtggaggcggttcaggcggaggtggctctggcggtggcggatcggaggtgcagctgttggagtctgggggaggcttggtacagcctggggggtccctgagactctcctgtgcagcctctggaagcctgtttagcgttgagcacatcggctggttccgccaggctccagggaaggagagagagtttgtctcagctcaggtaaccggtgggggttatacatactacgcagactccgtgaagggccggttcaccatctccagagacaattccaagaacacgctgtatctgcaaatgaacagcctgaaaccagaggacacggccgtatattactgttatgttagacttgtggaggaagcttactggggccaagggacccaggtcaccgtctcctcaaccacgacgccagcgccgcggccaccaacaccggcgcccaccatcgcgtcgcagcccctgtccctgcgcccagaggcgtgccggccagcggcggggggcgcagtgcacacgagggggctggacttcgcctgtgatatctacatctgggcgcccttggccgggacttgtggggtccttctcctgtcactggttatcaccctttactgccggagggaccagaggctgccccccgatgcccacaagccccctgggggaggcagtttccggacccccatccaagaggagcaggccgacgcccactccaccctggccaagatcagagtgaagttcagcaggagcgcagacgcccccgcgtaccagcagggccagaaccagctctataacgagctcaatctaggacgaagagaggagtacgatgttttggacaagagacgtggccgggaccctgagatggggggaaagccgagaaggaagaaccctcaggaaggcctgtacaatgaactgcagaaagataagatggcggaggcctacagtgagattgggatgaaaggcgagcgccggaggggcaaggggcacgatggcctttaccagggtctcagtacagccaccaaggacacctacgacgcccttcacatgcaggccctgccccctcgcggctctggcgagggaaggggttccctgcttacttgcggcgacgtcgaagagaatcccggtccgatggccctcccagtaactgccctccttttgcccctcgcactccttcttcatgccgctcgccccaactgggtcaacgtgattagcgatttgaagaaaatcgaggaccttatacagtctatgcatattgacgctacactgtatactgagagtgatgtacacccgtcctgtaaggtaacggccatgaaatgctttcttctggagctccaggtcatcagcttggagtctggggacgcaagcatccacgatacggttgaaaacctcatcatccttgcgaacaactctctctcatctaatggaaacgttacagagagtgggtgtaaggagtgcgaagagttggaagaaaaaaacatcaaagaatttcttcaatccttcgttcacatagtgcaaatgttcattaacacgtccactaccacacccgccccgaggccacctacgccggcaccgactatcgccagtcaacccctctctctgcgccccgaggcttgccggcctgcggctggtggggcggtccacacccggggcctggattttgcgtgcgatatatacatctgggcacctcttgccggcacctgcggagtgctgcttctctcactcgttattacgctgtactgctaa

SEQ ID NO: 3644 - DNA, 2142 bp, synthetic construct
  misc_feature 1..2142: note = Synthetic
  source 1..2142: mol_type = other DNA
atggccttaccagtgaccgccttgctcctgccgctggccttgctgctccacgccgccaggccggaggtgcagctgttggagtctgggggaggcttggtacagcctggggggtccctgagactctcctgtgcagcctctggattcatctttagcatttatgatatgggttggttccgccaggctccagggaaggaaagggagttcgtctcagctattagtactaccggtggaagcatttactacgcagactccgtgaagggccggttcaccatctccagagacaattccaagaacacgctgtatctgcaaatgaacagcctgaagccagaggacacggccgtatattactgtaacgccgaccctttagaaagctacgggtactggggccaagggacccaggtcaccgtctcctcaggtggaggcggttcaggcggaggtggctctggcggtggcggatcggaggtgcagctgttggagtctgggggaggcttggtacagcctggggggtccctgagactctcctgtgcagcctctggattcatctttagcatttatgatatgggttggttccgccaggctccagggaaggaaagggagttcgtctcagctattagtactaccggtggaagcatttactacgcagactccgtgaagggccggttcaccatctccagagacaattccaagaacacgctgtatctgcaaatgaacagcctgaagccagaggacacggccgtatattactgtaacgccgaccctttagaaagctacgggtactggggccaagggacccaggtcaccgtctcctcaaccacgacgccagcgccgcggccaccaacaccggcgcccaccatcgcgtcgcagcccctgtccctgcgcccagaggcgtgccggccagcggcggggggcgcagtgcacacgagggggctggacttcgcctgtgatatctacatctgggcgcccttggccgggacttgtggggtccttctcctgtcactggttatcaccctttactgccggagggaccagaggctgccccccgatgcccacaagccccctgggggaggcagtttccggacccccatccaagaggagcaggccgacgcccactccaccctggccaagatcagagtgaagttcagcaggagcgcagacgcccccgcgtaccagcagggccagaaccagctctataacgagctcaatctaggacgaagagaggagtacgatgttttggacaagagacgtggccgggaccctgagatggggggaaagccgagaaggaagaaccctcaggaaggcctgtacaatgaactgcagaaagataagatggcggaggcctacagtgagattgggatgaaaggcgagcgccggaggggcaaggggcacgatggcctttaccagggtctcagtacagccaccaaggacacctacgacgcccttcacatgcaggccctgccccctcgcggctctggcgagggaaggggttccctgcttacttgcggcgacgtcgaagagaatcccggtccgatggccctcccagtaactgccctccttttgcccctcgcactccttcttcatgccgctcgccccaactgggtcaacgtgattagcgatttgaagaaaatcgaggaccttatacagtctatgcatattgacgctacactgtatactgagagtgatgtacacccgtcctgtaaggtaacggccatgaaatgctttcttctggagctccaggtcatcagcttggagtctggggacgcaagcatccacgatacggttgaaaacctcatcatccttgcgaacaactctctctcatctaatggaaacgttacagagagtgggtgtaaggagtgcgaagagttggaagaaaaaaacatcaaagaatttcttcaatccttcgttcacatagtgcaaatgttcattaacacgtccactaccacacccgccccgaggccacctacgccggcaccgactatcgccagtcaacccctctctctgcgccccgaggcttgccggcctgcggctggtggggcggtccacacccggggcctggattttgcgtgcgatatatacatctgggcacctcttgccggcacctgcggagtgctgcttctctcactcgttattacgctgtactgctaa

SEQ ID NO: 3645 - DNA, 2154 bp, synthetic construct
  misc_feature 1..2154: note = Synthetic
  source 1..2154: mol_type = other DNA
atggccttaccagtgaccgccttgctcctgccgctggccttgctgctccacgccgccaggccggaggtgcagctgttggagtctgggggaggcttggtacagcctggggggtccctgagactctcctgtgcagcctctggatccgtatttagcagctatttcattggctggttccgccaggctccagggaaggagagagagttcgtctcagcagtgattagtagcagtggtagcacatactacgcagactccgtgaagggccggttcaccatctccagagacaattccaagaacacgctgtatctgcaaatgaacagcctgaagcctgaggacacggccgtatattactgtgttgcacgggaggatgttggcgagccctacggctactggggccaagggacccaggtcaccgtctcctcaggtggaggcggttcaggcggaggtggctctggcggtggcggatcggaggtgcagctgttggagtctgggggaggcttggtacagcctggggggtccctgagactctcctgtgcagcctctggatccgtatttagcagctatttcattggctggttccgccaggctccagggaaggagagagagttcgtctcagcagtgattagtagcagtggtagcacatactacgcagactccgtgaagggccggttcaccatctccagagacaattccaagaacacgctgtatctgcaaatgaacagcctgaagcctgaggacacggccgtatattactgtgttgcacgggaggatgttggcgagccctacggctactggggccaagggacccaggtcaccgtctcctcaaccacgacgccagcgccgcggccaccaacaccggcgcccaccatcgcgtcgcagcccctgtccctgcgcccagaggcgtgccggccagcggcggggggcgcagtgcacacgagggggctggacttcgcctgtgatatctacatctgggcgcccttggccgggacttgtggggtccttctcctgtcactggttatcaccctttactgccggagggaccagaggctgccccccgatgcccacaagccccctgggggaggcagtttccggacccccatccaagaggagcaggccgacgcccactccaccctggccaagatcagagtgaagttcagcaggagcgcagacgcccccgcgtaccagcagggccagaaccagctctataacgagctcaatctaggacgaagagaggagtacgatgttttggacaagagacgtggccgggaccctgagatggggggaaagccgagaaggaagaaccctcaggaaggcctgtacaatgaactgcagaaagataagatggcggaggcctacagtgagattgggatgaaaggcgagcgccggaggggcaaggggcacgatggcctttaccagggtctcagtacagccaccaaggacacctacgacgcccttcacatgcaggccctgccccctcgcggctctggcgagggaaggggttccctgcttacttgcggcgacgtcgaagagaatcccggtccgatggccctcccagtaactgccctccttttgcccctcgcactccttcttcatgccgctcgccccaactgggtcaacgtgattagcgatttgaagaaaatcgaggaccttatacagtctatgcatattgacgctacactgtatactgagagtgatgtacacccgtcctgtaaggtaacggccatgaaatgctttcttctggagctccaggtcatcagcttggagtctggggacgcaagcatccacgatacggttgaaaacctcatcatccttgcgaacaactctctctcatctaatggaaacgttacagagagtgggtgtaaggagtgcgaagagttggaagaaaaaaacatcaaagaatttcttcaatccttcgttcacatagtgcaaatgttcattaacacgtccactaccacacccgccccgaggccacctacgccggcaccgactatcgccagtcaacccctctctctgcgccccgaggcttgccggcctgcggctggtggggcggtccacacccggggcctggattttgcgtgcgatatatacatctgggcacctcttgccggcacctgcggagtgctgcttctctcactcgttattacgctgtactgctaa

SEQ ID NO: 3646 - DNA, 2160 bp, synthetic construct
  misc_feature 1..2160: note = Synthetic
  source 1..2160: mol_type = other DNA
atggccttaccagtgaccgccttgctcctgccgctggccttgctgctccacgccgccaggccggaggtgcagctgctggaaagcggcggcggactggtgcaacctggaggatctctgagactgagctgcgctgcttctggccggggctttaccagctactacatgggctggttcagacaggcccctggcaaggaacgggaattcgtgtccgccgtgatcttcccagagggctaccggtactacgccgacagcgtgaaaggcagattcaccatcagcagagataatagcaagaacaccctgtacctgcagatgaacagcctcaagcccgaggacacagccgtctactattgtgccaagtacacaggcttcggcgaggacgcctacagatactggggccagggcacccaggtgaccgtgtccagcggtggcggtggctcgggcggtggtgggtcgggtggcggcggatctgaggtgcagctgctggagagcggaggtggtctggtgcagccggggggctccttgcgcctgtcatgcgctgcttccgggcgaggttttaccagctactacatgggctggttccgccaggcccccggcaaggagcgcgagttcgtcagcgcagtgatttttcccgagggctacaggtattacgcggacagtgtgaaaggccgcttcaccatctcgcgggacaactccaagaacacgctttacctgcagatgaattccctcaagcctgaagatacagccgtgtactactgtgccaagtacaccggcttcggagaggacgcgtaccgttattggggccaaggcacccaggtcactgtttcttctaccacgacgccagcgccgcggccaccaacaccggcgcccaccatcgcgtcgcagcccctgtccctgcgcccagaggcgtgccggccagcggcggggggcgcagtgcacacgagggggctggacttcgcctgtgatatctacatctgggcgcccttggccgggacttgtggggtccttctcctgtcactggttatcaccctttactgccggagggaccagaggctgccccccgatgcccacaagccccctgggggaggcagtttccggacccccatccaagaggagcaggccgacgcccactccaccctggccaagatcagagtgaagttcagcaggagcgcagacgcccccgcgtaccagcagggccagaaccagctctataacgagctcaatctaggacgaagagaggagtacgatgttttggacaagagacgtggccgggaccctgagatggggggaaagccgagaaggaagaaccctcaggaaggcctgtacaatgaactgcagaaagataagatggcggaggcctacagtgagattgggatgaaaggcgagcgccggaggggcaaggggcacgatggcctttaccagggtctcagtacagccaccaaggacacctacgacgcccttcacatgcaggccctgccccctcgcggctctggcgagggaaggggttccctgcttacttgcggcgacgtcgaagagaatcccggtccgatggccctcccagtaactgccctccttttgcccctcgcactccttcttcatgccgctcgccccaactgggtcaacgtgattagcgatttgaagaaaatcgaggaccttatacagtctatgcatattgacgctacactgtatactgagagtgatgtacacccgtcctgtaaggtaacggccatgaaatgctttcttctggagctccaggtcatcagcttggagtctggggacgcaagcatccacgatacggttgaaaacctcatcatccttgcgaacaactctctctcatctaatggaaacgttacagagagtgggtgtaaggagtgcgaagagttggaagaaaaaaacatcaaagaatttcttcaatccttcgttcacatagtgcaaatgttcattaacacgtccactaccacacccgccccgaggccacctacgccggcaccgactatcgccagtcaacccctctctctgcgccccgaggcttgccggcctgcggctggtggggcggtccacacccggggcctggattttgcgtgcgatatatacatctgggcacctcttgccggcacctgcggagtgctgcttctctcactcgttattacgctgtactgctaa

SEQ ID NO: 3647 - DNA, 2154 bp, synthetic construct
  misc_feature 1..2154: note = Synthetic
  source 1..2154: mol_type = other DNA
atggccttaccagtgaccgccttgctcctgccgctggccttgctgctccacgccgccaggccggaggtgcagctgctggaatctggcggaggcctggtgcaacctggaggatctctgagactgagctgtgccgcttctggcctcacattcagcatccacacagttggctggtttagacaggcccctggcaaagagcgggaattcgtgtccgccgccctgggcagcggcggacgcccatactatagagatagcgtgaagggcagattcaccatcagccgggacaatagcaagaacaccctgtacctgcagatgaacagcctgaagcccgaggacaccgccgtgtactactgctacgtggacgtgggcaccggcctgtactacggctactggggccagggcacacaggtgaccgtctccagcggtggcggtggctcgggcggtggtgggtcgggtggcggcggatctgaggtgcagctgctggagagcggaggcggtctcgtgcagccgggagggagtctacgcctgtcgtgtgccgcaagcggtctcacgttttcaattcacaccgtgggctggttccgccaggccccaggcaaggagcgcgagttcgtcagcgcggctttgggctccggtgggcgtccctattacagggattctgtgaagggccgcttcaccatctctcgggacaactccaaaaacactctgtacctgcagatgaattccctgaagcctgaagacaccgccgtgtactactgctacgtggacgtagggactggcctttactacggctattggggccaaggcacccaggtcacagtttcgtccaccacgacgccagcgccgcggccaccaacaccggcgcccaccatcgcgtcgcagcccctgtccctgcgcccagaggcgtgccggccagcggcggggggcgcagtgcacacgagggggctggacttcgcctgtgatatctacatctgggcgcccttggccgggacttgtggggtccttctcctgtcactggttatcaccctttactgccggagggaccagaggctgccccccgatgcccacaagccccctgggggaggcagtttccggacccccatccaagaggagcaggccgacgcccactccaccctggccaagatcagagtgaagttcagcaggagcgcagacgcccccgcgtaccagcagggccagaaccagctctataacgagctcaatctaggacgaagagaggagtacgatgttttggacaagagacgtggccgggaccctgagatggggggaaagccgagaaggaagaaccctcaggaaggcctgtacaatgaactgcagaaagataagatggcggaggcctacagtgagattgggatgaaaggcgagcgccggaggggcaaggggcacgatggcctttaccagggtctcagtacagccaccaaggacacctacgacgcccttcacatgcaggccctgccccctcgcggctctggcgagggaaggggttccctgcttacttgcggcgacgtcgaagagaatcccggtccgatggccctcccagtaactgccctccttttgcccctcgcactccttcttcatgccgctcgccccaactgggtcaacgtgattagcgatttgaagaaaatcgaggaccttatacagtctatgcatattgacgctacactgtatactgagagtgatgtacacccgtcctgtaaggtaacggccatgaaatgctttcttctggagctccaggtcatcagcttggagtctggggacgcaagcatccacgatacggttgaaaacctcatcatccttgcgaacaactctctctcatctaatggaaacgttacagagagtgggtgtaaggagtgcgaagagttggaagaaaaaaacatcaaagaatttcttcaatccttcgttcacatagtgcaaatgttcattaacacgtccactaccacacccgccccgaggccacctacgccggcaccgactatcgccagtcaacccctctctctgcgccccgaggcttgccggcctgcggctggtggggcggtccacacccggggcctggattttgcgtgcgatatatacatctgggcacctcttgccggcacctgcggagtgctgcttctctcactcgttattacgctgtactgctaa

SEQ ID NO: 3648 - DNA, 2172 bp, synthetic construct
  misc_feature 1..2172: note = Synthetic
  source 1..2172: mol_type = other DNA
atggccttaccagtgaccgccttgctcctgccgctggccttgctgctccacgccgccaggccggaggtgcagctgctggaaagcggcggaggcctggtccaacctggaggaagcctgagactgtcttgtgccgccagcggcagaatcttcagctcttattttatgggctggttccggcaggcccctggcaaggaaagagagttcgtgtccgcccacatcagcagcgagggctctacatactaccgggacagcgtgaaaggcaggttcaccatctccagagataatagcaagaacaccctgtacctgcagatgaacagcctcaagcccgaggacaccgccgtgtactactgcgctgctagagaatacgccgacacccagcggggcgagtacgcctactggggccagggcacacaggtgaccgtgtccagcggtggcggtggctcgggcggtggtgggtcgggtggcggcggatctgaggtgcagctgctggagagcggcggaggtttggtgcagccggggggttctcttcgcctgagttgcgccgctagcggacgcattttttcaagctatttcatgggctggttccgccaggcccccggcaaggagcgagagttcgtcagcgcgcacatctcttccgagggctccacctactacagggattctgtgaagggccgcttcaccatctcgcgggacaactccaagaacacgctgtacctgcagatgaattccctcaaacctgaagacactgccgtgtactactgtgccgctcgcgagtacgcggacacccaacgtggggagtacgcatattggggccagggcacccaggtcacagtttcgtccaccacgacgccagcgccgcggccaccaacaccggcgcccaccatcgcgtcgcagcccctgtccctgcgcccagaggcgtgccggccagcggcggggggcgcagtgcacacgagggggctggacttcgcctgtgatatctacatctgggcgcccttggccgggacttgtggggtccttctcctgtcactggttatcaccctttactgccggagggaccagaggctgccccccgatgcccacaagccccctgggggaggcagtttccggacccccatccaagaggagcaggccgacgcccactccaccctggccaagatcagagtgaagttcagcaggagcgcagacgcccccgcgtaccagcagggccagaaccagctctataacgagctcaatctaggacgaagagaggagtacgatgttttggacaagagacgtggccgggaccctgagatggggggaaagccgagaaggaagaaccctcaggaaggcctgtacaatgaactgcagaaagataagatggcggaggcctacagtgagattgggatgaaaggcgagcgccggaggggcaaggggcacgatggcctttaccagggtctcagtacagccaccaaggacacctacgacgcccttcacatgcaggccctgccccctcgcggctctggcgagggaaggggttccctgcttacttgcggcgacgtcgaagagaatcccggtccgatggccctcccagtaactgccctccttttgcccctcgcactccttcttcatgccgctcgccccaactgggtcaacgtgattagcgatttgaagaaaatcgaggaccttatacagtctatgcatattgacgctacactgtatactgagagtgatgtacacccgtcctgtaaggtaacggccatgaaatgctttcttctggagctccaggtcatcagcttggagtctggggacgcaagcatccacgatacggttgaaaacctcatcatccttgcgaacaactctctctcatctaatggaaacgttacagagagtgggtgtaaggagtgcgaagagttggaagaaaaaaacatcaaagaatttcttcaatccttcgttcacatagtgcaaatgttcattaacacgtccactaccacacccgccccgaggccacctacgccggcaccgactatcgccagtcaacccctctctctgcgccccgaggcttgccggcctgcggctggtggggcggtccacacccggggcctggattttgcgtgcgatatatacatctgggcacctcttgccggcacctgcggagtgctgcttctctcactcgttattacgctgtactgctaa

SEQ ID NO: 3649 - DNA, 2142 bp, synthetic construct
  misc_feature 1..2142: note = Synthetic
  source 1..2142: mol_type = other DNA
atggccttaccagtgaccgccttgctcctgccgctggccttgctgctccacgccgccaggccggaggtgcagctgctggaaagcggaggcggcctggttcaacctggaggatctctgagactgagctgcgccgctagcggctctatcgtgtccagctacgccatgggctggtttagacaggcccctggcaaagagcgggaattcgtgtcctccgccatcggcaagggcggcgtcacaatctacgccgacagcgtgaagggcagattcaccatcagcagagataatagcaagaacaccctgtacctccagatgaacagcctgaagcccgaggacaccgccgtgtactattgtgctacagatgagagcacctaccgggactactggggccagggcacacaggtgaccgtgtctagcggtggcggtggctcgggcggtggtgggtcgggtggcggcggatctgaggtgcagctgctggagagcggagggggactggtgcagccgggcggctcccttcgtttgtcatgcgcagcttccggttctatcgtgtccagctacgccatgggctggttccgccaggcccccggcaaggagcgcgagttcgtctcttccgccatcggtaaaggtggggttacaatttacgcggacagcgtgaagggccgctttaccatctctcgggacaactccaagaacacgctgtacctgcagatgaattccctcaagcctgaagacaccgccgtgtactactgtgccaccgacgagagtacttacagggattattggggccaaggcacccaggtcactgtatcgtcgaccacgacgccagcgccgcggccaccaacaccggcgcccaccatcgcgtcgcagcccctgtccctgcgcccagaggcgtgccggccagcggcggggggcgcagtgcacacgagggggctggacttcgcctgtgatatctacatctgggcgcccttggccgggacttgtggggtccttctcctgtcactggttatcaccctttactgccggagggaccagaggctgccccccgatgcccacaagccccctgggggaggcagtttccggacccccatccaagaggagcaggccgacgcccactccaccctggccaagatcagagtgaagttcagcaggagcgcagacgcccccgcgtaccagcagggccagaaccagctctataacgagctcaatctaggacgaagagaggagtacgatgttttggacaagagacgtggccgggaccctgagatggggggaaagccgagaaggaagaaccctcaggaaggcctgtacaatgaactgcagaaagataagatggcggaggcctacagtgagattgggatgaaaggcgagcgccggaggggcaaggggcacgatggcctttaccagggtctcagtacagccaccaaggacacctacgacgcccttcacatgcaggccctgccccctcgcggctctggcgagggaaggggttccctgcttacttgcggcgacgtcgaagagaatcccggtccgatggccctcccagtaactgccctccttttgcccctcgcactccttcttcatgccgctcgccccaactgggtcaacgtgattagcgatttgaagaaaatcgaggaccttatacagtctatgcatattgacgctacactgtatactgagagtgatgtacacccgtcctgtaaggtaacggccatgaaatgctttcttctggagctccaggtcatcagcttggagtctggggacgcaagcatccacgatacggttgaaaacctcatcatccttgcgaacaactctctctcatctaatggaaacgttacagagagtgggtgtaaggagtgcgaagagttggaagaaaaaaacatcaaagaatttcttcaatccttcgttcacatagtgcaaatgttcattaacacgtccactaccacacccgccccgaggccacctacgccggcaccgactatcgccagtcaacccctctctctgcgccccgaggcttgccggcctgcggctggtggggcggtccacacccggggcctggattttgcgtgcgatatatacatctgggcacctcttgccggcacctgcggagtgctgcttctctcactcgttattacgctgtactgctaa

SEQ ID NO: 3650 - DNA, 2136 bp, synthetic construct
  misc_feature 1..2136: note = Synthetic
  source 1..2136: mol_type = other DNA
atggccttaccagtgaccgccttgctcctgccgctggccttgctgctccacgccgccaggccggaggtgcagctgctggaaagcggcggaggcctggtgcaacctggcggcagcctgagactgagctgcgctgcttctggatctctgtttcaggtcgagcacatcggctggttcagacaggcccctggcaaggaacgggacttcgtgtccgcccaggttacaggcggaggctacacctactacgccgacagcgtgaaaggcagattcaccatcagcagagataatagcaagaacaccctgtacctgcagatgaacagcctgaagcccgaggacaccgccgtgtactattgttacgtgcggctcgtggaagaggcctactggggccagggcacacaggtgaccgtgtccagcggtggcggtggctcgggcggtggtgggtcgggtggcggcggatctgaggtgcagctgctggagagcggtggagggctggtgcagccggggggctccctccgcctgagttgtgccgcttccggttctctgtttcaggtggagcacatcggttggttccgccaggcccccggcaaggagcgtgatttcgtctcggcacaagtcactggaggcggctacacctattacgcggacagcgtgaagggccgcttcaccatctctcgggacaactccaagaacacgctttacctgcagatgaattcgctaaaacctgaagacaccgccgtatactactgctacgtgaggttggtggaggaggcttattggggccagggcacccaggttacagtctcctcaaccacgacgccagcgccgcggccaccaacaccggcgcccaccatcgcgtcgcagcccctgtccctgcgcccagaggcgtgccggccagcggcggggggcgcagtgcacacgagggggctggacttcgcctgtgatatctacatctgggcgcccttggccgggacttgtggggtccttctcctgtcactggttatcaccctttactgccggagggaccagaggctgccccccgatgcccacaagccccctgggggaggcagtttccggacccccatccaagaggagcaggccgacgcccactccaccctggccaagatcagagtgaagttcagcaggagcgcagacgcccccgcgtaccagcagggccagaaccagctctataacgagctcaatctaggacgaagagaggagtacgatgttttggacaagagacgtggccgggaccctgagatggggggaaagccgagaaggaagaaccctcaggaaggcctgtacaatgaactgcagaaagataagatggcggaggcctacagtgagattgggatgaaaggcgagcgccggaggggcaaggggcacgatggcctttaccagggtctcagtacagccaccaaggacacctacgacgcccttcacatgcaggccctgccccctcgcggctctggcgagggaaggggttccctgcttacttgcggcgacgtcgaagagaatcccggtccgatggccctcccagtaactgccctccttttgcccctcgcactccttcttcatgccgctcgccccaactgggtcaacgtgattagcgatttgaagaaaatcgaggaccttatacagtctatgcatattgacgctacactgtatactgagagtgatgtacacccgtcctgtaaggtaacggccatgaaatgctttcttctggagctccaggtcatcagcttggagtctggggacgcaagcatccacgatacggttgaaaacctcatcatccttgcgaacaactctctctcatctaatggaaacgttacagagagtgggtgtaaggagtgcgaagagttggaagaaaaaaacatcaaagaatttcttcaatccttcgttcacatagtgcaaatgttcattaacacgtccactaccacacccgccccgaggccacctacgccggcaccgactatcgccagtcaacccctctctctgcgccccgaggcttgccggcctgcggctggtggggcggtccacacccggggcctggattttgcgtgcgatatatacatctgggcacctcttgccggcacctgcggagtgctgcttctctcactcgttattacgctgtactgctaa

SEQ ID NO: 3651 - DNA, 2172 bp, synthetic construct
  misc_feature 1..2172: note = Synthetic
  source 1..2172: mol_type = other DNA
atggccttaccagtgaccgccttgctcctgccgctggccttgctgctccacgccgccaggccggaggtgcagctgctggaaagcggcggcggactggtgcaacctggcggatctctgcggttgtcttgtgctgccagcggaacaaccttcgcctctagctttatgggctggttccggcaggcccctggcaaggaaagagagttcgtgtccgccatcgtgttcccaggcggcagcacatactatgccgacagcgtgaagggcagattcaccatcagcagagataattcaaagaacaccctgtacctgcagatgaacagcctgaaacccgaggacaccgccgtgtactactgcgccgctagacggtacgagctggtcgacagactggaatacgcctactggggccagggcacacaggtgaccgtgtccagcggtggcggtggctcgggcggtggtgggtcgggtggcggcggatctgaggtgcagctgctggaatctggaggcgggcttgtacagccgggcggttctctccgtctatcatgcgccgcgtcggggactacatttgcttccagttttatgggctggttccgccaggcccccggcaaggagcgggagttcgtcagcgccatcgtgttccctggtggctccacctactacgcggacagcgtgaagggccgattcaccatctctagggacaactccaaaaacacgctgtacctgcagatgaatagcttgaagcccgaggacaccgccgtttattactgtgctgctcgccgctacgagctggtggatcgcctggagtacgcatattggggccaaggcacccaggtcaccgtgtcgtccaccacgacgccagcgccgcggccaccaacaccggcgcccaccatcgcgtcgcagcccctgtccctgcgcccagaggcgtgccggccagcggcggggggcgcagtgcacacgagggggctggacttcgcctgtgatatctacatctgggcgcccttggccgggacttgtggggtccttctcctgtcactggttatcaccctttactgccggagggaccagaggctgccccccgatgcccacaagccccctgggggaggcagtttccggacccccatccaagaggagcaggccgacgcccactccaccctggccaagatcagagtgaagttcagcaggagcgcagacgcccccgcgtaccagcagggccagaaccagctctataacgagctcaatctaggacgaagagaggagtacgatgttttggacaagagacgtggccgggaccctgagatggggggaaagccgagaaggaagaaccctcaggaaggcctgtacaatgaactgcagaaagataagatggcggaggcctacagtgagattgggatgaaaggcgagcgccggaggggcaaggggcacgatggcctttaccagggtctcagtacagccaccaaggacacctacgacgcccttcacatgcaggccctgccccctcgcggctctggcgagggaaggggttccctgcttacttgcggcgacgtcgaagagaatcccggtccgatggccctcccagtaactgccctccttttgcccctcgcactccttcttcatgccgctcgccccaactgggtcaacgtgattagcgatttgaagaaaatcgaggaccttatacagtctatgcatattgacgctacactgtatactgagagtgatgtacacccgtcctgtaaggtaacggccatgaaatgctttcttctggagctccaggtcatcagcttggagtctggggacgcaagcatccacgatacggttgaaaacctcatcatccttgcgaacaactctctctcatctaatggaaacgttacagagagtgggtgtaaggagtgcgaagagttggaagaaaaaaacatcaaagaatttcttcaatccttcgttcacatagtgcaaatgttcattaacacgtccactaccacacccgccccgaggccacctacgccggcaccgactatcgccagtcaacccctctctctgcgccccgaggcttgccggcctgcggctggtggggcggtccacacccggggcctggattttgcgtgcgatatatacatctgggcacctcttgccggcacctgcggagtgctgcttctctcactcgttattacgctgtactgctaa

SEQ ID NO: 3652 - DNA, 2142 bp, synthetic construct
  misc_feature 1..2142: note = Synthetic
  source 1..2142: mol_type = other DNA
atggccttaccagtgaccgccttgctcctgccgctggccttgctgctccacgccgccaggccggaggtgcagctgctggaaagcggcggcggactggttcagcctggaggaagcctgagactgtcttgtgccgcctctggctctgtgttcagcagctttaccatcggctggttccggcaggcccccggcaaggagagagaattcgtgtccgccatcgtgacaagcaccggcagcacatactacgctgatagcgtcaagggcagattcacaatcagcagagacaatagcaaaaacaccctgtacctgcaaatgaactccctcaagcctgaggacaccgccgtgtactactgcaacgtgcggacccaggaggactactactattggggccagggcacccaggtgaccgtgtccagcggtggcggtggctcgggcggtggtgggtcgggtggcggcggatctgaggtgcagctgctggagagcggaggtggactggtgcagccgggggggtctttgaggctgagttgtgctgcttctggctccgtgttttcatccttcaccatcggttggttccgccaggcccccggcaaggagcgggagttcgtcagcgcaattgttacttcgaccggctccacttactacgcggacagcgtaaagggccgcttcacaatctcgcgtgacaactccaagaacacgctttacctgcagatgaattccctcaaacctgaagacaccgccgtgtactactgcaacgtgcgcacccaggaggattattactattggggccaaggcacccaggtcaccgtgagctctaccacgacgccagcgccgcggccaccaacaccggcgcccaccatcgcgtcgcagcccctgtccctgcgcccagaggcgtgccggccagcggcggggggcgcagtgcacacgagggggctggacttcgcctgtgatatctacatctgggcgcccttggccgggacttgtggggtccttctcctgtcactggttatcaccctttactgccggagggaccagaggctgccccccgatgcccacaagccccctgggggaggcagtttccggacccccatccaagaggagcaggccgacgcccactccaccctggccaagatcagagtgaagttcagcaggagcgcagacgcccccgcgtaccagcagggccagaaccagctctataacgagctcaatctaggacgaagagaggagtacgatgttttggacaagagacgtggccgggaccctgagatggggggaaagccgagaaggaagaaccctcaggaaggcctgtacaatgaactgcagaaagataagatggcggaggcctacagtgagattgggatgaaaggcgagcgccggaggggcaaggggcacgatggcctttaccagggtctcagtacagccaccaaggacacctacgacgcccttcacatgcaggccctgccccctcgcggctctggcgagggaaggggttccctgcttacttgcggcgacgtcgaagagaatcccggtccgatggccctcccagtaactgccctccttttgcccctcgcactccttcttcatgccgctcgccccaactgggtcaacgtgattagcgatttgaagaaaatcgaggaccttatacagtctatgcatattgacgctacactgtatactgagagtgatgtacacccgtcctgtaaggtaacggccatgaaatgctttcttctggagctccaggtcatcagcttggagtctggggacgcaagcatccacgatacggttgaaaacctcatcatccttgcgaacaactctctctcatctaatggaaacgttacagagagtgggtgtaaggagtgcgaagagttggaagaaaaaaacatcaaagaatttcttcaatccttcgttcacatagtgcaaatgttcattaacacgtccactaccacacccgccccgaggccacctacgccggcaccgactatcgccagtcaacccctctctctgcgccccgaggcttgccggcctgcggctggtggggcggtccacacccggggcctggattttgcgtgcgatatatacatctgggcacctcttgccggcacctgcggagtgctgcttctctcactcgttattacgctgtactgctaa

SEQ ID NO: 3653 - DNA, 2172 bp, synthetic construct
  misc_feature 1..2172: note = Synthetic
  source 1..2172: mol_type = other DNA
atggccttaccagtgaccgccttgctcctgccgctggccttgctgctccacgccgccaggccggaggtgcagctgctggaaagcggaggaggcctggtccagccaggcggctccctgagactgagctgtgccgcttctggcagcatcttcggcagccactttatgggctggttccggcaggcccctggcaaagagcgggaattcgtgtccgccgctgtgaccagcggcggatctacatattacgccgacagcgtgaagggcagattcaccatcagcagagataattctaagaacaccctgtacctgcagatgaacagcctcaagcccgaggacaccgccgtgtactactgcgccgccagaacctaccagagcacctaccaacctgagtacgcctactggggccagggcacacaggtgacagtgtccagcggtggcggtggctcgggcggtggtgggtcgggtggcggcggatctgaggtgcagctgctggagagcggaggtgggctggtgcagccggggggttctttgcgcctgtcatgcgccgcatctggctccatcttcggaagtcactttatgggctggttccgccaggcccccggcaaggagagggagttcgtctccgccgccgtgacctccggtggctccacttattacgcggacagcgttaagggccgcttcaccatttctcgtgacaactccaagaacacgctttacctgcagatgaattccctcaaacctgaagatacagccgtgtactactgtgctgctcggacctaccagagcacttaccaaccagagtacgcctattggggccagggcacccaggtcaccgtgtcgtcgaccacgacgccagcgccgcggccaccaacaccggcgcccaccatcgcgtcgcagcccctgtccctgcgcccagaggcgtgccggccagcggcggggggcgcagtgcacacgagggggctggacttcgcctgtgatatctacatctgggcgcccttggccgggacttgtggggtccttctcctgtcactggttatcaccctttactgccggagggaccagaggctgccccccgatgcccacaagccccctgggggaggcagtttccggacccccatccaagaggagcaggccgacgcccactccaccctggccaagatcagagtgaagttcagcaggagcgcagacgcccccgcgtaccagcagggccagaaccagctctataacgagctcaatctaggacgaagagaggagtacgatgttttggacaagagacgtggccgggaccctgagatggggggaaagccgagaaggaagaaccctcaggaaggcctgtacaatgaactgcagaaagataagatggcggaggcctacagtgagattgggatgaaaggcgagcgccggaggggcaaggggcacgatggcctttaccagggtctcagtacagccaccaaggacacctacgacgcccttcacatgcaggccctgccccctcgcggctctggcgagggaaggggttccctgcttacttgcggcgacgtcgaagagaatcccggtccgatggccctcccagtaactgccctccttttgcccctcgcactccttcttcatgccgctcgccccaactgggtcaacgtgattagcgatttgaagaaaatcgaggaccttatacagtctatgcatattgacgctacactgtatactgagagtgatgtacacccgtcctgtaaggtaacggccatgaaatgctttcttctggagctccaggtcatcagcttggagtctggggacgcaagcatccacgatacggttgaaaacctcatcatccttgcgaacaactctctctcatctaatggaaacgttacagagagtgggtgtaaggagtgcgaagagttggaagaaaaaaacatcaaagaatttcttcaatccttcgttcacatagtgcaaatgttcattaacacgtccactaccacacccgccccgaggccacctacgccggcaccgactatcgccagtcaacccctctctctgcgccccgaggcttgccggcctgcggctggtggggcggtccacacccggggcctggattttgcgtgcgatatatacatctgggcacctcttgccggcacctgcggagtgctgcttctctcactcgttattacgctgtactgctaa

SEQ ID NO: 3654 - DNA, 2184 bp, synthetic construct
  misc_feature 1..2184: note = Synthetic
  source 1..2184: mol_type = other DNA
atggccttaccagtgaccgccttgctcctgccgctggccttgctgctccacgccgccaggccggaggtgcagctgctggaaagcggcggaggcctggtccaacctggcggcagcctgagactgtcttgtgctgcttccggatctatcttcagcatcctggacatcggctggttccgccaggcccctggcaaggaacgggaattcgtgtccgcctatatcagcagcggcggatctacatactacagcgacagcgtgaaaggcagattcaccattagcagagataatagcaagaacaccctgtacctgcagatgaacagcctcaagcccgaggacaccgccgtgtactactgcgtggccacaatctttggcgatagaaccgagggccaggagcggtacgccttctggggccagggcacacaggtgaccgtgtccagcggtggcggtggctcgggcggtggtgggtcgggtggcggcggatctgaggtgcagctgctggagagcggaggagggttggtgcagccgggcgggagccttcgcctgtcatgcgccgcttctggctccattttttctatcctggacatcggttggttccgccaggcccccggcaaggagagggagttcgtcagcgcctacatctcgagcggtggctcgacctattactccgactccgtgaagggccgcttcaccatttctcgggacaactccaagaacacgctgtacctacagatgaattccctcaaacctgaagacactgcagtgtactactgcgtggctaccatctttggtgatcgtactgagggccaggagcgttacgcgttctggggccaaggcacccaggtcacagtttctagtaccacgacgccagcgccgcggccaccaacaccggcgcccaccatcgcgtcgcagcccctgtccctgcgcccagaggcgtgccggccagcggcggggggcgcagtgcacacgagggggctggacttcgcctgtgatatctacatctgggcgcccttggccgggacttgtggggtccttctcctgtcactggttatcaccctttactgccggagggaccagaggctgccccccgatgcccacaagccccctgggggaggcagtttccggacccccatccaagaggagcaggccgacgcccactccaccctggccaagatcagagtgaagttcagcaggagcgcagacgcccccgcgtaccagcagggccagaaccagctctataacgagctcaatctaggacgaagagaggagtacgatgttttggacaagagacgtggccgggaccctgagatggggggaaagccgagaaggaagaaccctcaggaaggcctgtacaatgaactgcagaaagataagatggcggaggcctacagtgagattgggatgaaaggcgagcgccggaggggcaaggggcacgatggcctttaccagggtctcagtacagccaccaaggacacctacgacgcccttcacatgcaggccctgccccctcgcggctctggcgagggaaggggttccctgcttacttgcggcgacgtcgaagagaatcccggtccgatggccctcccagtaactgccctccttttgcccctcgcactccttcttcatgccgctcgccccaactgggtcaacgtgattagcgatttgaagaaaatcgaggaccttatacagtctatgcatattgacgctacactgtatactgagagtgatgtacacccgtcctgtaaggtaacggccatgaaatgctttcttctggagctccaggtcatcagcttggagtctggggacgcaagcatccacgatacggttgaaaacctcatcatccttgcgaacaactctctctcatctaatggaaacgttacagagagtgggtgtaaggagtgcgaagagttggaagaaaaaaacatcaaagaatttcttcaatccttcgttcacatagtgcaaatgttcattaacacgtccactaccacacccgccccgaggccacctacgccggcaccgactatcgccagtcaacccctctctctgcgccccgaggcttgccggcctgcggctggtggggcggtccacacccggggcctggattttgcgtgcgatatatacatctgggcacctcttgccggcacctgcggagtgctgcttctctcactcgttattacgctgtactgctaa

SEQ ID NO: 3655 - DNA, 2172 bp, synthetic construct
  misc_feature 1..2172: note = Synthetic
  source 1..2172: mol_type = other DNA
atggccttaccagtgaccgccttgctcctgccgctggccttgctgctccacgccgccaggccggaggtgcagctgctggaaagcggaggcggcctggtccaaccaggcggatctctgcggctgagctgtgccgccagcggctctacaaccagcagctacttcatgggctggtttcggcaggcccctggcaaggaaagagagttcgtgtccgccatcatcacctcctccggcagcccctactacgccgacagcgtgaagggcagattcaccatcagcagagataatagcaagaacaccctgtacctccagatgaacagcctgaaacctgaggatacagccgtgtactactgcgctgctagacggtacggctctagagagacagacgactacggatattggggccagggcacccaggtgaccgtgtctagcggtggcggtggctcgggcggtggtgggtcgggtggcggcggatctgaagtgcagctgctggagagcggcggcggactggtgcagccaggaggttccttgcgcctttcatgcgctgcctctggttccacaacttcgagctactttatggggtggttcagacaggccccggggaaggagagggagttcgtcagcgcaattatcacctcctctggctccccctattacgcggactcggtgaaaggccggttcaccatctctcgcgacaactccaagaacacgctctacctgcagatgaattctctgaagcctgaggacaccgccgtgtactactgtgccgctcgtcgctacggctcccgcgagactgatgactacggttattggggccaaggcacccaggtcaccgttagcagtaccacgacgccagcgccgcggccaccaacaccggcgcccaccatcgcgtcgcagcccctgtccctgcgcccagaggcgtgccggccagcggcggggggcgcagtgcacacgagggggctggacttcgcctgtgatatctacatctgggcgcccttggccgggacttgtggggtccttctcctgtcactggttatcaccctttactgccggagggaccagaggctgccccccgatgcccacaagccccctgggggaggcagtttccggacccccatccaagaggagcaggccgacgcccactccaccctggccaagatcagagtgaagttcagcaggagcgcagacgcccccgcgtaccagcagggccagaaccagctctataacgagctcaatctaggacgaagagaggagtacgatgttttggacaagagacgtggccgggaccctgagatggggggaaagccgagaaggaagaaccctcaggaaggcctgtacaatgaactgcagaaagataagatggcggaggcctacagtgagattgggatgaaaggcgagcgccggaggggcaaggggcacgatggcctttaccagggtctcagtacagccaccaaggacacctacgacgcccttcacatgcaggccctgccccctcgcggctctggcgagggaaggggttccctgcttacttgcggcgacgtcgaagagaatcccggtccgatggccctcccagtaactgccctccttttgcccctcgcactccttcttcatgccgctcgccccaactgggtcaacgtgattagcgatttgaagaaaatcgaggaccttatacagtctatgcatattgacgctacactgtatactgagagtgatgtacacccgtcctgtaaggtaacggccatgaaatgctttcttctggagctccaggtcatcagcttggagtctggggacgcaagcatccacgatacggttgaaaacctcatcatccttgcgaacaactctctctcatctaatggaaacgttacagagagtgggtgtaaggagtgcgaagagttggaagaaaaaaacatcaaagaatttcttcaatccttcgttcacatagtgcaaatgttcattaacacgtccactaccacacccgccccgaggccacctacgccggcaccgactatcgccagtcaacccctctctctgcgccccgaggcttgccggcctgcggctggtggggcggtccacacccggggcctggattttgcgtgcgatatatacatctgggcacctcttgccggcacctgcggagtgctgcttctctcactcgttattacgctgtactgctaa

SEQ ID NO: 3656 - DNA, 2178 bp, synthetic construct
  misc_feature 1..2178: note = Synthetic
  source 1..2178: mol_type = other DNA
atggccttaccagtgaccgccttgctcctgccgctggccttgctgctccacgccgccaggccggaggtgcagctgctggaaagcggcggcggcctggtgcaacctggaggctctctgcggctgagctgcgctgcttctggctccgtctttagcagctacagcatgtggttcagacaggcccctggcaaggaaagagagttcgtgtccgccattatcaccagcggcggcagcacctactacgccgatagcgtgaaaggcagattcaccatcagccgggacaatagcaagaacaccctgtacctgcagatgaacagcctcaagcccgaggacaccgccgtgtactattgtgtggccgtgtacggcatcggcacaggccagtacatcggaacatacgacatctggggacagggcacacaggtgaccgtgtctagcggtggcggtggctcgggcggtggtgggtcgggtggcggcggatctgaggtgcagctgctggagagcgggggtggtctggtgcagccgggcgggtcgttgcgtctgtcatgcgccgcttctggctccgtattttctagctactccatgtggttccgccaggcccccggcaaggagcgcgagttcgtctccgccatcatcaccagcggaggctccacttactacgcggacagtgtgaagggccgcttcaccatttctcgggacaactccaagaacacgctttacctgcagatgaattccctcaaacctgaagatactgccgtttattactgcgtggcagtgtacggcatcggtacaggacaatatattgggacctacgacatctggggccagggcacccaggtcaccgtgtcgtccaccacgacgccagcgccgcggccaccaacaccggcgcccaccatcgcgtcgcagcccctgtccctgcgcccagaggcgtgccggccagcggcggggggcgcagtgcacacgagggggctggacttcgcctgtgatatctacatctgggcgcccttggccgggacttgtggggtccttctcctgtcactggttatcaccctttactgccggagggaccagaggctgccccccgatgcccacaagccccctgggggaggcagtttccggacccccatccaagaggagcaggccgacgcccactccaccctggccaagatcagagtgaagttcagcaggagcgcagacgcccccgcgtaccagcagggccagaaccagctctataacgagctcaatctaggacgaagagaggagtacgatgttttggacaagagacgtggccgggaccctgagatggggggaaagccgagaaggaagaaccctcaggaaggcctgtacaatgaactgcagaaagataagatggcggaggcctacagtgagattgggatgaaaggcgagcgccggaggggcaaggggcacgatggcctttaccagggtctcagtacagccaccaaggacacctacgacgcccttcacatgcaggccctgccccctcgcggctctggcgagggaaggggttccctgcttacttgcggcgacgtcgaagagaatcccggtccgatggccctcccagtaactgccctccttttgcccctcgcactccttcttcatgccgctcgccccaactgggtcaacgtgattagcgatttgaagaaaatcgaggaccttatacagtctatgcatattgacgctacactgtatactgagagtgatgtacacccgtcctgtaaggtaacggccatgaaatgctttcttctggagctccaggtcatcagcttggagtctggggacgcaagcatccacgatacggttgaaaacctcatcatccttgcgaacaactctctctcatctaatggaaacgttacagagagtgggtgtaaggagtgcgaagagttggaagaaaaaaacatcaaagaatttcttcaatccttcgttcacatagtgcaaatgttcattaacacgtccactaccacacccgccccgaggccacctacgccggcaccgactatcgccagtcaacccctctctctgcgccccgaggcttgccggcctgcggctggtggggcggtccacacccggggcctggattttgcgtgcgatatatacatctgggcacctcttgccggcacctgcggagtgctgcttctctcactcgttattacgctgtactgctaa

SEQ ID NO: 3657 - DNA, 2166 bp, synthetic construct
  misc_feature 1..2166: note = Synthetic
  source 1..2166: mol_type = other DNA
atggccttaccagtgaccgccttgctcctgccgctggccttgctgctccacgccgccaggccggaggtgcagctgctggaaagcggaggaggcctggtccaacctggaggatctctgcggctgagctgcgccgcttctggcagcctgctcagcatctacgacatgggctggtttagacaggcccctggcaaggaacgggaattcgtgtccgccagaatcggcaaaggcggctctacatactacgccgacagcgtgaagggcagattcaccatcagcagagataatagcaagaacaccctgtacctgcagatgaacagcctgaagcccgaggacacagccgtgtactattgtgctgtgctggtgggcgagggcgagagctacggctaccactactggggccagggcacccaggtgaccgtgtccagcggtggcggtggctcgggcggtggtgggtcgggtggcggcggatctgaggtgcaactgctggagagtgggggtggattggtgcagccgggtggctccctccgcctgtcatgcgccgcttctggctcccttctcagcatttacgacatggggtggttccgccaggcccccggcaaggagcgggagttcgtctccgcccgcatcggtaaaggaggctcgacctactacgcggactccgtgaagggcaggtttaccatctctcgtgacaactccaagaacacgctatacctgcagatgaattcgctgaagcctgaagatactgcagtttattactgtgccgtgctggtaggggagggcgagagctacggctaccactattggggccagggcacccaggtcaccgtgtcctctaccacgacgccagcgccgcggccaccaacaccggcgcccaccatcgcgtcgcagcccctgtccctgcgcccagaggcgtgccggccagcggcggggggcgcagtgcacacgagggggctggacttcgcctgtgatatctacatctgggcgcccttggccgggacttgtggggtccttctcctgtcactggttatcaccctttactgccggagggaccagaggctgccccccgatgcccacaagccccctgggggaggcagtttccggacccccatccaagaggagcaggccgacgcccactccaccctggccaagatcagagtgaagttcagcaggagcgcagacgcccccgcgtaccagcagggccagaaccagctctataacgagctcaatctaggacgaagagaggagtacgatgttttggacaagagacgtggccgggaccctgagatggggggaaagccgagaaggaagaaccctcaggaaggcctgtacaatgaactgcagaaagataagatggcggaggcctacagtgagattgggatgaaaggcgagcgccggaggggcaaggggcacgatggcctttaccagggtctcagtacagccaccaaggacacctacgacgcccttcacatgcaggccctgccccctcgcggctctggcgagggaaggggttccctgcttacttgcggcgacgtcgaagagaatcccggtccgatggccctcccagtaactgccctccttttgcccctcgcactccttcttcatgccgctcgccccaactgggtcaacgtgattagcgatttgaagaaaatcgaggaccttatacagtctatgcatattgacgctacactgtatactgagagtgatgtacacccgtcctgtaaggtaacggccatgaaatgctttcttctggagctccaggtcatcagcttggagtctggggacgcaagcatccacgatacggttgaaaacctcatcatccttgcgaacaactctctctcatctaatggaaacgttacagagagtgggtgtaaggagtgcgaagagttggaagaaaaaaacatcaaagaatttcttcaatccttcgttcacatagtgcaaatgttcattaacacgtccactaccacacccgccccgaggccacctacgccggcaccgactatcgccagtcaacccctctctctgcgccccgaggcttgccggcctgcggctggtggggcggtccacacccggggcctggattttgcgtgcgatatatacatctgggcacctcttgccggcacctgcggagtgctgcttctctcactcgttattacgctgtactgctaa

SEQ ID NO: 3658 - DNA, 2178 bp, synthetic construct
  misc_feature 1..2178: note = Synthetic
  source 1..2178: mol_type = other DNA
atggccttaccagtgaccgccttgctcctgccgctggccttgctgctccacgccgccaggccggaggtgcagctgctggaaagcggcggcggactggtccaacctggaggcagcctgagactgtcttgtgccgccagcggcatcggcctctccatctactttatgggctggttccggcaggcccctggcaaggaacgggaattcgtgtccgccatcatcagcagcagcggatctacctactacgccgacagcgtgaaaggcagattcaccatctctagagataatagcaagaacaccctgtacctgcagatgaacagcctgaagcccgaggacaccgccgtgtactactgcgctgctagaaccggctacagcgagtacgagcaggaggactacggctattggggccagggcacacaggtgacagtgtccagcggtggcggtggctcgggcggtggtgggtcgggtggcggcggatctgaggtgcagctgctggagagcggaggtgggctggtgcagccgggaggttctctacggttgtcatgcgccgcgtctggcatcggtcttagcatttactttatgggctggttccgccaggcccccgggaaggagagggagttcgtctcggccatcatctcttcttccggctccacttattacgcggacagcgttaagggccgcttcaccatctcgcgtgacaactccaagaacacgctgtacctgcagatgaattccctcaaacctgaagatacagcagtgtactactgtgctgctcgcaccggctactccgagtacgagcaggaggactacggctattggggccaaggcacccaggtcaccgtgtccagtaccacgacgccagcgccgcggccaccaacaccggcgcccaccatcgcgtcgcagcccctgtccctgcgcccagaggcgtgccggccagcggcggggggcgcagtgcacacgagggggctggacttcgcctgtgatatctacatctgggcgcccttggccgggacttgtggggtccttctcctgtcactggttatcaccctttactgccggagggaccagaggctgccccccgatgcccacaagccccctgggggaggcagtttccggacccccatccaagaggagcaggccgacgcccactccaccctggccaagatcagagtgaagttcagcaggagcgcagacgcccccgcgtaccagcagggccagaaccagctctataacgagctcaatctaggacgaagagaggagtacgatgttttggacaagagacgtggccgggaccctgagatggggggaaagccgagaaggaagaaccctcaggaaggcctgtacaatgaactgcagaaagataagatggcggaggcctacagtgagattgggatgaaaggcgagcgccggaggggcaaggggcacgatggcctttaccagggtctcagtacagccaccaaggacacctacgacgcccttcacatgcaggccctgccccctcgcggctctggcgagggaaggggttccctgcttacttgcggcgacgtcgaagagaatcccggtccgatggccctcccagtaactgccctccttttgcccctcgcactccttcttcatgccgctcgccccaactgggtcaacgtgattagcgatttgaagaaaatcgaggaccttatacagtctatgcatattgacgctacactgtatactgagagtgatgtacacccgtcctgtaaggtaacggccatgaaatgctttcttctggagctccaggtcatcagcttggagtctggggacgcaagcatccacgatacggttgaaaacctcatcatccttgcgaacaactctctctcatctaatggaaacgttacagagagtgggtgtaaggagtgcgaagagttggaagaaaaaaacatcaaagaatttcttcaatccttcgttcacatagtgcaaatgttcattaacacgtccactaccacacccgccccgaggccacctacgccggcaccgactatcgccagtcaacccctctctctgcgccccgaggcttgccggcctgcggctggtggggcggtccacacccggggcctggattttgcgtgcgatatatacatctgggcacctcttgccggcacctgcggagtgctgcttctctcactcgttattacgctgtactgctaa

SEQ ID NO: 3659 - DNA, 2172 bp, synthetic construct
  misc_feature 1..2172: note = Synthetic
  source 1..2172: mol_type = other DNA
atggccttaccagtgaccgccttgctcctgccgctggccttgctgctccacgccgccaggccggaggtgcagctgctggaaagcggcggaggcctggtgcaacctggaggatctctcagactgagctgcgccgcttctggcagcatcttcagcagctccttcatcggctggttcagacaggcccctggcaaagagcgggaattcgtgtccgccgtgatcgcctcttctggcagcacctactacgccgacagcgtgaagggccggtttaccatcagcagagataatagcaagaacaccctgtacctgcagatgaacagcctgaagcccgaggacaccgccgtgtactattgtgctggcagattcggccagggcggcggcacagtcgagtacggctactggggccagggaacacaggtgaccgtgtccagcggtggcggtggctcgggcggtggtgggtcgggtggcggcggatctgaggtgcaactgctggagagcggcggcgggcttgtgcagccggggggctccctccggctgtcatgcgcggcctctggctccatcttcagcagctcctttatcggttggttccgccaggcccccggcaaggagcgcgagttcgtctctgcagtaattgcttcctctggttcgacttattacgcggacagtgttaaaggccgcttcaccatcagcagggacaactccaagaacacgctgtacttgcagatgaattccctgaagcctgaagatacagccgtgtactactgtgctggccgcttcggacagggcggtggtaccgtggagtacggctactggggccaggggacccaggtgaccgtctcttcgaccacgacgccagcgccgcggccaccaacaccggcgcccaccatcgcgtcgcagcccctgtccctgcgcccagaggcgtgccggccagcggcggggggcgcagtgcacacgagggggctggacttcgcctgtgatatctacatctgggcgcccttggccgggacttgtggggtccttctcctgtcactggttatcaccctttactgccggagggaccagaggctgccccccgatgcccacaagccccctgggggaggcagtttccggacccccatccaagaggagcaggccgacgcccactccaccctggccaagatcagagtgaagttcagcaggagcgcagacgcccccgcgtaccagcagggccagaaccagctctataacgagctcaatctaggacgaagagaggagtacgatgttttggacaagagacgtggccgggaccctgagatggggggaaagccgagaaggaagaaccctcaggaaggcctgtacaatgaactgcagaaagataagatggcggaggcctacagtgagattgggatgaaaggcgagcgccggaggggcaaggggcacgatggcctttaccagggtctcagtacagccaccaaggacacctacgacgcccttcacatgcaggccctgccccctcgcggctctggcgagggaaggggttccctgcttacttgcggcgacgtcgaagagaatcccggtccgatggccctcccagtaactgccctccttttgcccctcgcactccttcttcatgccgctcgccccaactgggtcaacgtgattagcgatttgaagaaaatcgaggaccttatacagtctatgcatattgacgctacactgtatactgagagtgatgtacacccgtcctgtaaggtaacggccatgaaatgctttcttctggagctccaggtcatcagcttggagtctggggacgcaagcatccacgatacggttgaaaacctcatcatccttgcgaacaactctctctcatctaatggaaacgttacagagagtgggtgtaaggagtgcgaagagttggaagaaaaaaacatcaaagaatttcttcaatccttcgttcacatagtgcaaatgttcattaacacgtccactaccacacccgccccgaggccacctacgccggcaccgactatcgccagtcaacccctctctctgcgccccgaggcttgccggcctgcggctggtggggcggtccacacccggggcctggattttgcgtgcgatatatacatctgggcacctcttgccggcacctgcggagtgctgcttctctcactcgttattacgctgtactgctaa

SEQ ID NO: 3660 - DNA, 2172 bp, synthetic construct
  misc_feature 1..2172: note = Synthetic
  source 1..2172: mol_type = other DNA
atggccttaccagtgaccgccttgctcctgccgctggccttgctgctccacgccgccaggccggaagtgcagctgctggaaagcggcggaggcctggtccaacctggaggatctctcagactgagctgtgccgccagcggcagagtgttcagcttctacttcatgggctggttccggcaggcccctggcaaagagcgggaatttgtgtccggcgtgatcggcaagacaggctctacatactacaccgacagcgtgaagggcagattcaccatcagcagagataatagcaagaacaccctgtacctgcagatgaacagcctgaagcccgaggacaccgccgtgtactactgcgctgcttctgagtaccagggcaccggctacggcgagtttgcctattggggccagggaacacaggtgaccgtgtccagcggtggcggtggctcgggcggtggtgggtcgggtggcggcggatctgaggtacagctgctggagagcgggggaggactggtgcagccgggcggcagccttaggctgtcttgcgcagcttccggtcgcgtgttctccttttatttcatggggtggttccgccaggcccctggtaaggagcgcgagttcgtctccggtgttattggcaagaccggctccacttactacactgattctgtgaagggccgcttcaccatcagccgggacaactccaaaaacacgttgtacctgcagatgaattctctcaagcccgaggacaccgccgtgtactactgtgctgccagtgagtaccaggggacaggctacggcgaatttgcctattggggccagggcacccaagtcaccgtgtcgtcgaccacgacgccagcgccgcggccaccaacaccggcgcccaccatcgcgtcgcagcccctgtccctgcgcccagaggcgtgccggccagcggcggggggcgcagtgcacacgagggggctggacttcgcctgtgatatctacatctgggcgcccttggccgggacttgtggggtccttctcctgtcactggttatcaccctttactgccggagggaccagaggctgccccccgatgcccacaagccccctgggggaggcagtttccggacccccatccaagaggagcaggccgacgcccactccaccctggccaagatcagagtgaagttcagcaggagcgcagacgcccccgcgtaccagcagggccagaaccagctctataacgagctcaatctaggacgaagagaggagtacgatgttttggacaagagacgtggccgggaccctgagatggggggaaagccgagaaggaagaaccctcaggaaggcctgtacaatgaactgcagaaagataagatggcggaggcctacagtgagattgggatgaaaggcgagcgccggaggggcaaggggcacgatggcctttaccagggtctcagtacagccaccaaggacacctacgacgcccttcacatgcaggccctgccccctcgcggctctggcgagggaaggggttccctgcttacttgcggcgacgtcgaagagaatcccggtccgatggccctcccagtaactgccctccttttgcccctcgcactccttcttcatgccgctcgccccaactgggtcaacgtgattagcgatttgaagaaaatcgaggaccttatacagtctatgcatattgacgctacactgtatactgagagtgatgtacacccgtcctgtaaggtaacggccatgaaatgctttcttctggagctccaggtcatcagcttggagtctggggacgcaagcatccacgatacggttgaaaacctcatcatccttgcgaacaactctctctcatctaatggaaacgttacagagagtgggtgtaaggagtgcgaagagttggaagaaaaaaacatcaaagaatttcttcaatccttcgttcacatagtgcaaatgttcattaacacgtccactaccacacccgccccgaggccacctacgccggcaccgactatcgccagtcaacccctctctctgcgccccgaggcttgccggcctgcggctggtggggcggtccacacccggggcctggattttgcgtgcgatatatacatctgggcacctcttgccggcacctgcggagtgctgcttctctcactcgttattacgctgtactgctaa

SEQ ID NO: 3661 - DNA, 2136 bp, synthetic construct
  misc_feature 1..2136: note = Synthetic
  source 1..2136: mol_type = other DNA
atggccttaccagtgaccgccttgctcctgccgctggccttgctgctccacgccgccaggccggaggtgcagctgctggaaagcggaggcggcctggtgcaacctggcggatctctgagactgagctgtgctgcttctggcagcctgttcgaggttgagcacatcggctggtttagacaggcccctggaaaagagcgggaattcgtgtccgcccaggtgaccggcggcggctacacctactatgccgacagcgtgaagggcagattcaccatcagcagagataatagcaagaacaccctgtacctgcagatgaacagcctcaagcccgaggacaccgccgtgtactactgctacgtgcggctggtcgaggaagcctactggggccagggcacacaggtgacagtgtccagcggtggcggtggctcgggcggtggtgggtcgggtggcggcggatctgaggtgcagctgctggagagcggaggcggtctcgtccaacctggcggctcccttcgtttgtcatgcgccgcttccggttctctgtttgaggtggagcacatcggttggttccgccaggcccccgggaaggagcgggagttcgtctccgcccaggtcacaggcgggggctacacctattacgcggacagtgtaaaaggacgcttcaccatttctagggacaactccaagaacacgctgtacctgcagatgaattccctcaagccggaagatactgcagtgtactactgttacgtgcgcctggtggaggaggcctattggggccagggcacccaggttaccgtgagctcgaccacgacgccagcgccgcggccaccaacaccggcgcccaccatcgcgtcgcagcccctgtccctgcgcccagaggcgtgccggccagcggcggggggcgcagtgcacacgagggggctggacttcgcctgtgatatctacatctgggcgcccttggccgggacttgtggggtccttctcctgtcactggttatcaccctttactgccggagggaccagaggctgccccccgatgcccacaagccccctgggggaggcagtttccggacccccatccaagaggagcaggccgacgcccactccaccctggccaagatcagagtgaagttcagcaggagcgcagacgcccccgcgtaccagcagggccagaaccagctctataacgagctcaatctaggacgaagagaggagtacgatgttttggacaagagacgtggccgggaccctgagatggggggaaagccgagaaggaagaaccctcaggaaggcctgtacaatgaactgcagaaagataagatggcggaggcctacagtgagattgggatgaaaggcgagcgccggaggggcaaggggcacgatggcctttaccagggtctcagtacagccaccaaggacacctacgacgcccttcacatgcaggccctgccccctcgcggctctggcgagggaaggggttccctgcttacttgcggcgacgtcgaagagaatcccggtccgatggccctcccagtaactgccctccttttgcccctcgcactccttcttcatgccgctcgccccaactgggtcaacgtgattagcgatttgaagaaaatcgaggaccttatacagtctatgcatattgacgctacactgtatactgagagtgatgtacacccgtcctgtaaggtaacggccatgaaatgctttcttctggagctccaggtcatcagcttggagtctggggacgcaagcatccacgatacggttgaaaacctcatcatccttgcgaacaactctctctcatctaatggaaacgttacagagagtgggtgtaaggagtgcgaagagttggaagaaaaaaacatcaaagaatttcttcaatccttcgttcacatagtgcaaatgttcattaacacgtccactaccacacccgccccgaggccacctacgccggcaccgactatcgccagtcaacccctctctctgcgccccgaggcttgccggcctgcggctggtggggcggtccacacccggggcctggattttgcgtgcgatatatacatctgggcacctcttgccggcacctgcggagtgctgcttctctcactcgttattacgctgtactgctaa

SEQ ID NO: 3662 - DNA, 2184 bp, synthetic construct
  misc_feature 1..2184: note = Synthetic
  source 1..2184: mol_type = other DNA
atggccttaccagtgaccgccttgctcctgccgctggccttgctgctccacgccgccaggccggaggtgcagctgctggaaagcggcggaggactggtccagcctggcggcagcctgcggctgagctgcgccgcctctggcagaatcttcggcgagtacttcatcggatggtttcggcaggccccaggaaaagagcgcgagttcgtgtccgccattatcacaggcagcggcatcacccactacgccgacagcgtgaagggcagattcaccatctccagagacaactctaagaataccctgtacctgcagatgaacagcctcaagcctgaagatacagccgtgtactactgtgctgctagaacagactacaccaccggccaagagctgcccgaatatggctactggggccagggcacccaggtgaccgtgagcagcggtggcggtggctcgggcggtggtgggtcgggtggcggcggatctgaggtgcagctgctggagagcggtggtggtctggtgcagccgggggggagcctacggttgtcatgcgcggcaagtgggcgcatcttcggcgagtacttcatcggatggttccgccaggccccaggcaaggagagggagttcgtctcggccatcattaccggctccggcatcactcactacgcggacagcgttaagggccgcttcaccatctctcgcgacaactccaagaacacgctttacctgcagatgaattccctcaaacctgaagacaccgccgtgtactactgtgctgctcgtactgattacaccacaggacaggagctgcccgagtacggctattggggccaaggcacccaggtcaccgtgtcctctaccacgacgccagcgccgcggccaccaacaccggcgcccaccatcgcgtcgcagcccctgtccctgcgcccagaggcgtgccggccagcggcggggggcgcagtgcacacgagggggctggacttcgcctgtgatatctacatctgggcgcccttggccgggacttgtggggtccttctcctgtcactggttatcaccctttactgccggagggaccagaggctgccccccgatgcccacaagccccctgggggaggcagtttccggacccccatccaagaggagcaggccgacgcccactccaccctggccaagatcagagtgaagttcagcaggagcgcagacgcccccgcgtaccagcagggccagaaccagctctataacgagctcaatctaggacgaagagaggagtacgatgttttggacaagagacgtggccgggaccctgagatggggggaaagccgagaaggaagaaccctcaggaaggcctgtacaatgaactgcagaaagataagatggcggaggcctacagtgagattgggatgaaaggcgagcgccggaggggcaaggggcacgatggcctttaccagggtctcagtacagccaccaaggacacctacgacgcccttcacatgcaggccctgccccctcgcggctctggcgagggaaggggttccctgcttacttgcggcgacgtcgaagagaatcccggtccgatggccctcccagtaactgccctccttttgcccctcgcactccttcttcatgccgctcgccccaactgggtcaacgtgattagcgatttgaagaaaatcgaggaccttatacagtctatgcatattgacgctacactgtatactgagagtgatgtacacccgtcctgtaaggtaacggccatgaaatgctttcttctggagctccaggtcatcagcttggagtctggggacgcaagcatccacgatacggttgaaaacctcatcatccttgcgaacaactctctctcatctaatggaaacgttacagagagtgggtgtaaggagtgcgaagagttggaagaaaaaaacatcaaagaatttcttcaatccttcgttcacatagtgcaaatgttcattaacacgtccactaccacacccgccccgaggccacctacgccggcaccgactatcgccagtcaacccctctctctgcgccccgaggcttgccggcctgcggctggtggggcggtccacacccggggcctggattttgcgtgcgatatatacatctgggcacctcttgccggcacctgcggagtgctgcttctctcactcgttattacgctgtactgctaa

SEQ ID NO: 3663 - DNA, 2154 bp, synthetic construct
  misc_feature 1..2154: note = Synthetic
  source 1..2154: mol_type = other DNA
atggccttaccagtgaccgccttgctcctgccgctggccttgctgctccacgccgccaggccggaggtgcagctgctggaaagcggcggcggcctcgtgcaacctggcggaagcctgagactgagctgcgccgcttctggctctatcgagagcatctacttcatcggctggttcagacaggcccctggcaaggaacgggaattcgtgtccgccgagtttatccccggaggcagcaccgtctacagcgacagcgtgaagggcagattcaccatcagcagagataacagcaagaacaccctgtacctgcagatgaacagcctgaaaccagaggacaccgccgtgtactactgtaatgccggcctggacgagggccggtactatacatactggggccagggcacacaggtgaccgtgtctagcggtggcggtggctcgggcggtggtgggtcgggtggcggcggatctgaggtgcagctgctggagagtggaggagggctggtgcagccagggggttctttgcgcctgagctgtgctgcttccggctccattgagagcatctactttatcggttggttccgccaggcccccggcaaggagagggagttcgtctcggcggagttcatcccgggcggctccactgtttacagcgattctgtgaagggccgcttcaccatctctcgggacaactccaagaacacgctatacctgcaaatgaacagccttaaacctgaagacaccgccgtgtactactgcaatgcaggtctcgacgagggccgttattacacctattggggccagggcacccaggtcacagtgtcgtccaccacgacgccagcgccgcggccaccaacaccggcgcccaccatcgcgtcgcagcccctgtccctgcgcccagaggcgtgccggccagcggcggggggcgcagtgcacacgagggggctggacttcgcctgtgatatctacatctgggcgcccttggccgggacttgtggggtccttctcctgtcactggttatcaccctttactgccggagggaccagaggctgccccccgatgcccacaagccccctgggggaggcagtttccggacccccatccaagaggagcaggccgacgcccactccaccctggccaagatcagagtgaagttcagcaggagcgcagacgcccccgcgtaccagcagggccagaaccagctctataacgagctcaatctaggacgaagagaggagtacgatgttttggacaagagacgtggccgggaccctgagatggggggaaagccgagaaggaagaaccctcaggaaggcctgtacaatgaactgcagaaagataagatggcggaggcctacagtgagattgggatgaaaggcgagcgccggaggggcaaggggcacgatggcctttaccagggtctcagtacagccaccaaggacacctacgacgcccttcacatgcaggccctgccccctcgcggctctggcgagggaaggggttccctgcttacttgcggcgacgtcgaagagaatcccggtccgatggccctcccagtaactgccctccttttgcccctcgcactccttcttcatgccgctcgccccaactgggtcaacgtgattagcgatttgaagaaaatcgaggaccttatacagtctatgcatattgacgctacactgtatactgagagtgatgtacacccgtcctgtaaggtaacggccatgaaatgctttcttctggagctccaggtcatcagcttggagtctggggacgcaagcatccacgatacggttgaaaacctcatcatccttgcgaacaactctctctcatctaatggaaacgttacagagagtgggtgtaaggagtgcgaagagttggaagaaaaaaacatcaaagaatttcttcaatccttcgttcacatagtgcaaatgttcattaacacgtccactaccacacccgccccgaggccacctacgccggcaccgactatcgccagtcaacccctctctctgcgccccgaggcttgccggcctgcggctggtggggcggtccacacccggggcctggattttgcgtgcgatatatacatctgggcacctcttgccggcacctgcggagtgctgcttctctcactcgttattacgctgtactgctaa

SEQ ID NO: 3664 - DNA, 2136 bp, synthetic construct
  misc_feature 1..2136: note = Synthetic
  source 1..2136: mol_type = other DNA
atggccttaccagtgaccgccttgctcctgccgctggccttgctgctccacgccgccaggccggaggttcagctgctggaaagcggaggcggcctggtgcaacctggcggcagcctgcggctgagctgtgccgcttctggcatcgaggtgtctagcagcgtggtcggctggtttagacaggcccctggcaaggaaagagagttcgtgtccgccagcggcgtgggcggatctacatactacgctgatagcgtgaaaggcagattcaccatcagccgggacaatagcaagaacaccctgtacctgcagatgaacagcctcaagcccgaggacaccgccgtgtattactgctacgccgtgtacctgaccatctacacatactggggacagggcacacaggtgaccgtgtcctccggtggcggtggctcgggcggtggtgggtcgggtggcggcggatctgaagtgcagctgctggagagcggaggtgggctggtgcagccggggggttctcttcgtctatcatgcgccgcttctggcattgaggtgagcagttccgtggtgggttggttccggcaggcccctggcaaggagcgcgagttcgtctccgcctccggagtaggcggctccacatactacgcggacagcgttaaaggccgctttactatctctcgcgataactccaagaacactctgtacctgcagatgaattccctcaagcccgaggacaccgccgtgtactattgttacgcagtctacttgacgatctacacctattggggccaaggcacccaggtcaccgtgtcgtcgaccacgacgccagcgccgcggccaccaacaccggcgcccaccatcgcgtcgcagcccctgtccctgcgcccagaggcgtgccggccagcggcggggggcgcagtgcacacgagggggctggacttcgcctgtgatatctacatctgggcgcccttggccgggacttgtggggtccttctcctgtcactggttatcaccctttactgccggagggaccagaggctgccccccgatgcccacaagccccctgggggaggcagtttccggacccccatccaagaggagcaggccgacgcccactccaccctggccaagatcagagtgaagttcagcaggagcgcagacgcccccgcgtaccagcagggccagaaccagctctataacgagctcaatctaggacgaagagaggagtacgatgttttggacaagagacgtggccgggaccctgagatggggggaaagccgagaaggaagaaccctcaggaaggcctgtacaatgaactgcagaaagataagatggcggaggcctacagtgagattgggatgaaaggcgagcgccggaggggcaaggggcacgatggcctttaccagggtctcagtacagccaccaaggacacctacgacgcccttcacatgcaggccctgccccctcgcggctctggcgagggaaggggttccctgcttacttgcggcgacgtcgaagagaatcccggtccgatggccctcccagtaactgccctccttttgcccctcgcactccttcttcatgccgctcgccccaactgggtcaacgtgattagcgatttgaagaaaatcgaggaccttatacagtctatgcatattgacgctacactgtatactgagagtgatgtacacccgtcctgtaaggtaacggccatgaaatgctttcttctggagctccaggtcatcagcttggagtctggggacgcaagcatccacgatacggttgaaaacctcatcatccttgcgaacaactctctctcatctaatggaaacgttacagagagtgggtgtaaggagtgcgaagagttggaagaaaaaaacatcaaagaatttcttcaatccttcgttcacatagtgcaaatgttcattaacacgtccactaccacacccgccccgaggccacctacgccggcaccgactatcgccagtcaacccctctctctgcgccccgaggcttgccggcctgcggctggtggggcggtccacacccggggcctggattttgcgtgcgatatatacatctgggcacctcttgccggcacctgcggagtgctgcttctctcactcgttattacgctgtactgctaa

SEQ ID NO: 3665 - DNA, 2142 bp, synthetic construct
  misc_feature 1..2142: note = Synthetic
  source 1..2142: mol_type = other DNA
atggccttaccagtgaccgccttgctcctgccgctggccttgctgctccacgccgccaggccggaggtgcagctcctggaaagcggcggaggcctggtgcaacctggaggctctctgagactgtcttgtgccgctagcggatttaccatctccagatacgccatggcctggttccggcaggcccctggcaaggaaagagagttcgtgtccggcagcatcttcgtgggcggcggcacatactatagagatagcgtgaaaggccgcttcaccatcagccgggacaatagcaagaacaccctgtacctgcagatgaacagcctgaagcccgaggacaccgccgtgtactactgctacgctacagtcggcgacagctactactactggggccagggcacccaggtgacagtgtctagcggtggcggtggctcgggcggtggtgggtcgggtggcggcggatctgaggtgcagctgctggagagcggtggagggctggtgcagccgggaggctccctccgcttgtcatgcgctgcaagtggctttactatttcccgctacgccatggcttggttcaggcaagcccccggcaaggagcgggagttcgttagcggctccatcttcgtcggtggtggcacctactaccgtgattctgtgaagggccgcttcaccatctctcgcgacaactccaagaacacgctttacctgcagatgaattctctgaaacctgaagacactgccgtgtactactgttacgcgacagtaggggacagctattactattggggccagggcacccaggtcaccgtgtcgtcgaccacgacgccagcgccgcggccaccaacaccggcgcccaccatcgcgtcgcagcccctgtccctgcgcccagaggcgtgccggccagcggcggggggcgcagtgcacacgagggggctggacttcgcctgtgatatctacatctgggcgcccttggccgggacttgtggggtccttctcctgtcactggttatcaccctttactgccggagggaccagaggctgccccccgatgcccacaagccccctgggggaggcagtttccggacccccatccaagaggagcaggccgacgcccactccaccctggccaagatcagagtgaagttcagcaggagcgcagacgcccccgcgtaccagcagggccagaaccagctctataacgagctcaatctaggacgaagagaggagtacgatgttttggacaagagacgtggccgggaccctgagatggggggaaagccgagaaggaagaaccctcaggaaggcctgtacaatgaactgcagaaagataagatggcggaggcctacagtgagattgggatgaaaggcgagcgccggaggggcaaggggcacgatggcctttaccagggtctcagtacagccaccaaggacacctacgacgcccttcacatgcaggccctgccccctcgcggctctggcgagggaaggggttccctgcttacttgcggcgacgtcgaagagaatcccggtccgatggccctcccagtaactgccctccttttgcccctcgcactccttcttcatgccgctcgccccaactgggtcaacgtgattagcgatttgaagaaaatcgaggaccttatacagtctatgcatattgacgctacactgtatactgagagtgatgtacacccgtcctgtaaggtaacggccatgaaatgctttcttctggagctccaggtcatcagcttggagtctggggacgcaagcatccacgatacggttgaaaacctcatcatccttgcgaacaactctctctcatctaatggaaacgttacagagagtgggtgtaaggagtgcgaagagttggaagaaaaaaacatcaaagaatttcttcaatccttcgttcacatagtgcaaatgttcattaacacgtccactaccacacccgccccgaggccacctacgccggcaccgactatcgccagtcaacccctctctctgcgccccgaggcttgccggcctgcggctggtggggcggtccacacccggggcctggattttgcgtgcgatatatacatctgggcacctcttgccggcacctgcggagtgctgcttctctcactcgttattacgctgtactgctaa

SEQ ID NO: 3666 - DNA, 2136 bp, synthetic construct
  misc_feature 1..2136: note = Synthetic
  source 1..2136: mol_type = other DNA
atggccttaccagtgaccgccttgctcctgccgctggccttgctgctccacgccgccaggccggaggtgcagctgctggaaagcggcggaggcctggtgcaacctggaggcagcctgagactgagctgcgctgcttctggcagcctgttcagcgtggaacacatcggctggtttagacaggcccctggcaaagagcgggagttcgtgtccgcccaggttacaggcggcggctacacctactacgccgacagcgtgaagggcagattcaccatcagcagagataatagcaagaacaccctgtacctgcagatgaacagcctcaagcccgaggacaccgccgtgtactattgttacgtgcggctggtcgaggaagcctactggggccagggcacccaggtgacagtgtcttctggtggcggtggctcgggcggtggtgggtcgggtggcggcggatctgaggtgcagctgctggagagcggagggggattggtgcagccggggggctcccttcgtctaagttgcgccgcttccggttctctgttttcagtggagcacatcggttggttccgccaggcccccggcaaggagcgggagttcgtcagcgcacaagtcaccggcggtggctacacctattacgcggacagcgttaagggccgcttcaccatttctagggacaactccaagaacacgctgtacctgcagatgaattccctcaaacctgaagatacagccgtgtactactgttacgtgcgcctggtggaggaggcttattggggccagggcacccaggtcactgtatcgtcgaccacgacgccagcgccgcggccaccaacaccggcgcccaccatcgcgtcgcagcccctgtccctgcgcccagaggcgtgccggccagcggcggggggcgcagtgcacacgagggggctggacttcgcctgtgatatctacatctgggcgcccttggccgggacttgtggggtccttctcctgtcactggttatcaccctttactgccggagggaccagaggctgccccccgatgcccacaagccccctgggggaggcagtttccggacccccatccaagaggagcaggccgacgcccactccaccctggccaagatcagagtgaagttcagcaggagcgcagacgcccccgcgtaccagcagggccagaaccagctctataacgagctcaatctaggacgaagagaggagtacgatgttttggacaagagacgtggccgggaccctgagatggggggaaagccgagaaggaagaaccctcaggaaggcctgtacaatgaactgcagaaagataagatggcggaggcctacagtgagattgggatgaaaggcgagcgccggaggggcaaggggcacgatggcctttaccagggtctcagtacagccaccaaggacacctacgacgcccttcacatgcaggccctgccccctcgcggctctggcgagggaaggggttccctgcttacttgcggcgacgtcgaagagaatcccggtccgatggccctcccagtaactgccctccttttgcccctcgcactccttcttcatgccgctcgccccaactgggtcaacgtgattagcgatttgaagaaaatcgaggaccttatacagtctatgcatattgacgctacactgtatactgagagtgatgtacacccgtcctgtaaggtaacggccatgaaatgctttcttctggagctccaggtcatcagcttggagtctggggacgcaagcatccacgatacggttgaaaacctcatcatccttgcgaacaactctctctcatctaatggaaacgttacagagagtgggtgtaaggagtgcgaagagttggaagaaaaaaacatcaaagaatttcttcaatccttcgttcacatagtgcaaatgttcattaacacgtccactaccacacccgccccgaggccacctacgccggcaccgactatcgccagtcaacccctctctctgcgccccgaggcttgccggcctgcggctggtggggcggtccacacccggggcctggattttgcgtgcgatatatacatctgggcacctcttgccggcacctgcggagtgctgcttctctcactcgttattacgctgtactgctaa

SEQ ID NO: 3667 - DNA, 2142 bp, synthetic construct
  misc_feature 1..2142: note = Synthetic
  source 1..2142: mol_type = other DNA
atggccttaccagtgaccgccttgctcctgccgctggccttgctgctccacgccgccaggccggaggtgcagctgctggaaagcggaggcggcctggtccaacctggaggcagcctgagactgagctgcgccgctagcggctttatcttcagcatctacgacatgggctggttccggcaggcccctggcaaagagcgggaattcgtgtccgccatctctacaacaggcggatctatctactacgccgacagcgtgaagggcagattcaccatcagcagagataacagcaagaacaccctgtacctgcagatgaactccctcaagcccgaggacaccgccgtgtactattgtaatgctgatccactggagagctacggctactggggccagggcacccaggtgaccgtgtctagcggtggcggtggctcgggcggtggtgggtcgggtggcggcggatctgaggtgcaactgctggagagtgggggagggctggtgcagccgggaggctccctccgtctttcgtgtgctgcttccggcttcatcttttcaatttacgacatgggctggttccgccaggcccccggcaaggagcgcgagttcgtctctgccatctcgaccacaggtggttccatctattacgcggacagcgtgaagggtcgcttcaccatctctcgggacaactccaagaacacgctatacctgcagatgaacagcttgaaacctgaagatactgccgtgtactactgcaatgcagaccccctggagagctacggctattggggccagggcacccaggtcaccgtttcttccaccacgacgccagcgccgcggccaccaacaccggcgcccaccatcgcgtcgcagcccctgtccctgcgcccagaggcgtgccggccagcggcggggggcgcagtgcacacgagggggctggacttcgcctgtgatatctacatctgggcgcccttggccgggacttgtggggtccttctcctgtcactggttatcaccctttactgccggagggaccagaggctgccccccgatgcccacaagccccctgggggaggcagtttccggacccccatccaagaggagcaggccgacgcccactccaccctggccaagatcagagtgaagttcagcaggagcgcagacgcccccgcgtaccagcagggccagaaccagctctataacgagctcaatctaggacgaagagaggagtacgatgttttggacaagagacgtggccgggaccctgagatggggggaaagccgagaaggaagaaccctcaggaaggcctgtacaatgaactgcagaaagataagatggcggaggcctacagtgagattgggatgaaaggcgagcgccggaggggcaaggggcacgatggcctttaccagggtctcagtacagccaccaaggacacctacgacgcccttcacatgcaggccctgccccctcgcggctctggcgagggaaggggttccctgcttacttgcggcgacgtcgaagagaatcccggtccgatggccctcccagtaactgccctccttttgcccctcgcactccttcttcatgccgctcgccccaactgggtcaacgtgattagcgatttgaagaaaatcgaggaccttatacagtctatgcatattgacgctacactgtatactgagagtgatgtacacccgtcctgtaaggtaacggccatgaaatgctttcttctggagctccaggtcatcagcttggagtctggggacgcaagcatccacgatacggttgaaaacctcatcatccttgcgaacaactctctctcatctaatggaaacgttacagagagtgggtgtaaggagtgcgaagagttggaagaaaaaaacatcaaagaatttcttcaatccttcgttcacatagtgcaaatgttcattaacacgtccactaccacacccgccccgaggccacctacgccggcaccgactatcgccagtcaacccctctctctgcgccccgaggcttgccggcctgcggctggtggggcggtccacacccggggcctggattttgcgtgcgatatatacatctgggcacctcttgccggcacctgcggagtgctgcttctctcactcgttattacgctgtactgctaa

SEQ ID NO: 3668 - DNA, 2154 bp, synthetic construct
  misc_feature 1..2154: note = Synthetic
  source 1..2154: mol_type = other DNA
atggccttaccagtgaccgccttgctcctgccgctggccttgctgctccacgccgccaggccggaggtgcagctgctggaatctggcggcggactggtgcaacctggcggcagcctgagactgagctgcgccgcttctggctctgtgttcagctcctactttatcggctggttccggcaggcccctggaaaggaaagagagttcgtgtccgccgtgatctccagcagcggaagcacctactacgccgacagcgtgaaaggcagattcaccatcagccgggacaatagcaagaacaccctgtacctgcagatgaacagcctcaagcccgaggacacagctgtctactattgtgtggccagagaagatgtgggcgagccatacggctactggggccagggcacacaggtgaccgtgtctagcggtggcggtggctcgggcggtggtgggtcgggtggcggcggatctgaggtgcagctgctggagagcggcggcggtctggtgcagccgggaggctccctccgcctgtcatgcgccgcttccggatcggtgttttctagctacttcatcggttggttccgccaggcccccgggaaggagcgggagttcgtctccgccgtgatttcttcttctggctccacctactacgcggacagcgtgaagggtcgcttcaccatctcgcgtgacaactccaaaaacacgctttacctgcagatgaattccttgaagcctgaagatacagccgtgtactactgcgtggcaagggaggacgtgggggagccctatggctattggggccaaggcacccaggtcactgtatccagtaccacgacgccagcgccgcggccaccaacaccggcgcccaccatcgcgtcgcagcccctgtccctgcgcccagaggcgtgccggccagcggcggggggcgcagtgcacacgagggggctggacttcgcctgtgatatctacatctgggcgcccttggccgggacttgtggggtccttctcctgtcactggttatcaccctttactgccggagggaccagaggctgccccccgatgcccacaagccccctgggggaggcagtttccggacccccatccaagaggagcaggccgacgcccactccaccctggccaagatcagagtgaagttcagcaggagcgcagacgcccccgcgtaccagcagggccagaaccagctctataacgagctcaatctaggacgaagagaggagtacgatgttttggacaagagacgtggccgggaccctgagatggggggaaagccgagaaggaagaaccctcaggaaggcctgtacaatgaactgcagaaagataagatggcggaggcctacagtgagattgggatgaaaggcgagcgccggaggggcaaggggcacgatggcctttaccagggtctcagtacagccaccaaggacacctacgacgcccttcacatgcaggccctgccccctcgcggctctggcgagggaaggggttccctgcttacttgcggcgacgtcgaagagaatcccggtccgatggccctcccagtaactgccctccttttgcccctcgcactccttcttcatgccgctcgccccaactgggtcaacgtgattagcgatttgaagaaaatcgaggaccttatacagtctatgcatattgacgctacactgtatactgagagtgatgtacacccgtcctgtaaggtaacggccatgaaatgctttcttctggagctccaggtcatcagcttggagtctggggacgcaagcatccacgatacggttgaaaacctcatcatccttgcgaacaactctctctcatctaatggaaacgttacagagagtgggtgtaaggagtgcgaagagttggaagaaaaaaacatcaaagaatttcttcaatccttcgttcacatagtgcaaatgttcattaacacgtccactaccacacccgccccgaggccacctacgccggcaccgactatcgccagtcaacccctctctctgcgccccgaggcttgccggcctgcggctggtggggcggtccacacccggggcctggattttgcgtgcgatatatacatctgggcacctcttgccggcacctgcggagtgctgcttctctcactcgttattacgctgtactgctaa

SEQ ID NO: 3669 - protein, 502 aa, synthetic construct
  REGION 1..502: note = Synthetic
MALPVTALLLPLALLLHAARPEVQLLESGGGLVQPGGSLRLSCAASGRGFTSYYMGWFRQAPGKEREFVSAVIFPEGYRYYADSVKGRFTISRDNSKNTLYLQMNSLKPEDTAVYYCAKYTGFGEDAYRYWGQGTQVTVSSGGGGSGGGGSGGGGSEVQLLESGGGLVQPGGSLRLSCAASGRGFTSYYMGWFRQAPGKEREFVSAVIFPEGYRYYADSVKGRFTISRDNSKNTLYLQMNSLKPEDTAVYYCAKYTGFGEDAYRYWGQGTQVTVSSAAATTTPAPRPPTPAPTIASQPLSLRPEACRPAAGGAVHTRGLDFACDIYIWAPLAGTCGVLLLSLVITLYCKRGRKKLLYIFKQPFMRPVQTTQEEDGCSCRFPEEEEGGCELRVKFSRSADAPAYQQGQNQLYNELNLGRREEYDVLDKRRGRDPEMGGKPRRKNPQEGLYNELQKDKMAEAYSEIGMKGERRRGKGHDGLYQGLSTATKDTYDALHMQALPPR

SEQ ID NO: 3670 - protein, 500 aa, synthetic construct
  REGION 1..500: note = Synthetic
MALPVTALLLPLALLLHAARPEVQLLESGGGLVQPGGSLRLSCAASGLTFSIHTVGWFRQAPGKEREFVSAALGSGGRPYYRDSVKGRFTISRDNSKNTLYLQMNSLKPEDTAVYYCYVDVGTGLYYGYWGQGTQVTVSSGGGGSGGGGSGGGGSEVQLLESGGGLVQPGGSLRLSCAASGLTFSIHTVGWFRQAPGKEREFVSAALGSGGRPYYRDSVKGRFTISRDNSKNTLYLQMNSLKPEDTAVYYCYVDVGTGLYYGYWGQGTQVTVSSAAATTTPAPRPPTPAPTIASQPLSLRPEACRPAAGGAVHTRGLDFACDIYIWAPLAGTCGVLLLSLVITLYCKRGRKKLLYIFKQPFMRPVQTTQEEDGCSCRFPEEEEGGCELRVKFSRSADAPAYQQGQNQLYNELNLGRREEYDVLDKRRGRDPEMGGKPRRKNPQEGLYNELQKDKMAEAYSEIGMKGERRRGKGHDGLYQGLSTATKDTYDALHMQALPPR

SEQ ID NO: 3671 - protein, 506 aa, synthetic construct
  REGION 1..506: note = Synthetic
MALPVTALLLPLALLLHAARPEVQLLESGGGLVQPGGSLRLSCAASGRIFSSYFMGWFRQAPGKEREFVSAHISSEGSTYYRDSVKGRFTISRDNSKNTLYLQMNSLKPEDTAVYYCAAREYADTQRGEYAYWGQGTQVTVSSGGGGSGGGGSGGGGSEVQLLESGGGLVQPGGSLRLSCAASGRIFSSYFMGWFRQAPGKEREFVSAHISSEGSTYYRDSVKGRFTISRDNSKNTLYLQMNSLKPEDTAVYYCAAREYADTQRGEYAYWGQGTQVTVSSAAATTTPAPRPPTPAPTIASQPLSLRPEACRPAAGGAVHTRGLDFACDIYIWAPLAGTCGVLLLSLVITLYCKRGRKKLLYIFKQPFMRPVQTTQEEDGCSCRFPEEEEGGCELRVKFSRSADAPAYQQGQNQLYNELNLGRREEYDVLDKRRGRDPEMGGKPRRKNPQEGLYNELQKDKMAEAYSEIGMKGERRRGKGHDGLYQGLSTATKDTYDALHMQALPPR

SEQ ID NO: 3672 - protein, 496 aa, synthetic construct
  REGION 1..496: note = Synthetic
MALPVTALLLPLALLLHAARPEVQLLESGGGLVQPGGSLRLSCAASGSIVSSYAMGWFRQAPGKEREFVSSAIGKGGVTIYADSVKGRFTISRDNSKNTLYLQMNSLKPEDTAVYYCATDESTYRDYWGQGTQVTVSSGGGGSGGGGSGGGGSEVQLLESGGGLVQPGGSLRLSCAASGSIVSSYAMGWFRQAPGKEREFVSSAIGKGGVTIYADSVKGRFTISRDNSKNTLYLQMNSLKPEDTAVYYCATDESTYRDYWGQGTQVTVSSAAATTTPAPRPPTPAPTIASQPLSLRPEACRPAAGGAVHTRGLDFACDIYIWAPLAGTCGVLLLSLVITLYCKRGRKKLLYIFKQPFMRPVQTTQEEDGCSCRFPEEEEGGCELRVKFSRSADAPAYQQGQNQLYNELNLGRREEYDVLDKRRGRDPEMGGKPRRKNPQEGLYNELQKDKMAEAYSEIGMKGERRRGKGHDGLYQGLSTATKDTYDALHMQALPPR

SEQ ID NO: 3673 - protein, 494 aa, synthetic construct
  REGION 1..494: note = Synthetic
MALPVTALLLPLALLLHAARPEVQLLESGGGLVQPGGSLRLSCAASGSLFQVEHIGWFRQAPGKERDFVSAQVTGGGYTYYADSVKGRFTISRDNSKNTLYLQMNSLKPEDTAVYYCYVRLVEEAYWGQGTQVTVSSGGGGSGGGGSGGGGSEVQLLESGGGLVQPGGSLRLSCAASGSLFQVEHIGWFRQAPGKERDFVSAQVTGGGYTYYADSVKGRFTISRDNSKNTLYLQMNSLKPEDTAVYYCYVRLVEEAYWGQGTQVTVSSAAATTTPAPRPPTPAPTIASQPLSLRPEACRPAAGGAVHTRGLDFACDIYIWAPLAGTCGVLLLSLVITLYCKRGRKKLLYIFKQPFMRPVQTTQEEDGCSCRFPEEEEGGCELRVKFSRSADAPAYQQGQNQLYNELNLGRREEYDVLDKRRGRDPEMGGKPRRKNPQEGLYNELQKDKMAEAYSEIGMKGERRRGKGHDGLYQGLSTATKDTYDALHMQALPPR

SEQ ID NO: 3674 - protein, 506 aa, synthetic construct
  REGION 1..506: note = Synthetic
MALPVTALLLPLALLLHAARPEVQLLESGGGLVQPGGSLRLSCAASGTTFASSFMGWFRQAPGKEREFVSAIVFPGGSTYYADSVKGRFTISRDNSKNTLYLQMNSLKPEDTAVYYCAARRYELVDRLEYAYWGQGTQVTVSSGGGGSGGGGSGGGGSEVQLLESGGGLVQPGGSLRLSCAASGTTFASSFMGWFRQAPGKEREFVSAIVFPGGSTYYADSVKGRFTISRDNSKNTLYLQMNSLKPEDTAVYYCAARRYELVDRLEYAYWGQGTQVTVSSAAATTTPAPRPPTPAPTIASQPLSLRPEACRPAAGGAVHTRGLDFACDIYIWAPLAGTCGVLLLSLVITLYCKRGRKKLLYIFKQPFMRPVQTTQEEDGCSCRFPEEEEGGCELRVKFSRSADAPAYQQGQNQLYNELNLGRREEYDVLDKRRGRDPEMGGKPRRKNPQEGLYNELQKDKMAEAYSEIGMKGERRRGKGHDGLYQGLSTATKDTYDALHMQALPPR

SEQ ID NO: 3675 - protein, 496 aa, synthetic construct
  REGION 1..496: note = Synthetic
MALPVTALLLPLALLLHAARPEVQLLESGGGLVQPGGSLRLSCAASGSVFSSFTIGWFRQAPGKEREFVSAIVTSTGSTYYADSVKGRFTISRDNSKNTLYLQMNSLKPEDTAVYYCNVRTQEDYYYWGQGTQVTVSSGGGGSGGGGSGGGGSEVQLLESGGGLVQPGGSLRLSCAASGSVFSSFTIGWFRQAPGKEREFVSAIVTSTGSTYYADSVKGRFTISRDNSKNTLYLQMNSLKPEDTAVYYCNVRTQEDYYYWGQGTQVTVSSAAATTTPAPRPPTPAPTIASQPLSLRPEACRPAAGGAVHTRGLDFACDIYIWAPLAGTCGVLLLSLVITLYCKRGRKKLLYIFKQPFMRPVQTTQEEDGCSCRFPEEEEGGCELRVKFSRSADAPAYQQGQNQLYNELNLGRREEYDVLDKRRGRDPEMGGKPRRKNPQEGLYNELQKDKMAEAYSEIGMKGERRRGKGHDGLYQGLSTATKDTYDALHMQALPPR

SEQ ID NO: 3676 - protein, 506 aa, synthetic construct
  REGION 1..506: note = Synthetic
MALPVTALLLPLALLLHAARPEVQLLESGGGLVQPGGSLRLSCAASGSIFGSHFMGWFRQAPGKEREFVSAAVTSGGSTYYADSVKGRFTISRDNSKNTLYLQMNSLKPEDTAVYYCAARTYQSTYQPEYAYWGQGTQVTVSSGGGGSGGGGSGGGGSEVQLLESGGGLVQPGGSLRLSCAASGSIFGSHFMGWFRQAPGKEREFVSAAVTSGGSTYYADSVKGRFTISRDNSKNTLYLQMNSLKPEDTAVYYCAARTYQSTYQPEYAYWGQGTQVTVSSAAATTTPAPRPPTPAPTIASQPLSLRPEACRPAAGGAVHTRGLDFACDIYIWAPLAGTCGVLLLSLVITLYCKRGRKKLLYIFKQPFMRPVQTTQEEDGCSCRFPEEEEGGCELRVKFSRSADAPAYQQGQNQLYNELNLGRREEYDVLDKRRGRDPEMGGKPRRKNPQEGLYNELQKDKMAEAYSEIGMKGERRRGKGHDGLYQGLSTATKDTYDALHMQALPPR

SEQ ID NO: 3677 - protein, 510 aa, synthetic construct
  REGION 1..510: note = Synthetic
MALPVTALLLPLALLLHAARPEVQLLESGGGLVQPGGSLRLSCAASGSIFSILDIGWFRQAPGKEREFVSAYISSGGSTYYSDSVKGRFTISRDNSKNTLYLQMNSLKPEDTAVYYCVATIFGDRTEGQERYAFWGQGTQVTVSSGGGGSGGGGSGGGGSEVQLLESGGGLVQPGGSLRLSCAASGSIFSILDIGWFRQAPGKEREFVSAYISSGGSTYYSDSVKGRFTISRDNSKNTLYLQMNSLKPEDTAVYYCVATIFGDRTEGQERYAFWGQGTQVTVSSAAATTTPAPRPPTPAPTIASQPLSLRPEACRPAAGGAVHTRGLDFACDIYIWAPLAGTCGVLLLSLVITLYCKRGRKKLLYIFKQPFMRPVQTTQEEDGCSCRFPEEEEGGCELRVKFSRSADAPAYQQGQNQLYNELNLGRREEYDVLDKRRGRDPEMGGKPRRKNPQEGLYNELQKDKMAEAYSEIGMKGERRRGKGHDGLYQGLSTATKDTYDALHMQALPPR

SEQ ID NO: 3678 - protein, 506 aa, synthetic construct
  REGION 1..506: note = Synthetic
MALPVTALLLPLALLLHAARPEVQLLESGGGLVQPGGSLRLSCAASGSTTSSYFMGWFRQAPGKEREFVSAIITSSGSPYYADSVKGRFTISRDNSKNTLYLQMNSLKPEDTAVYYCAARRYGSRETDDYGYWGQGTQVTVSSGGGGSGGGGSGGGGSEVQLLESGGGLVQPGGSLRLSCAASGSTTSSYFMGWFRQAPGKEREFVSAIITSSGSPYYADSVKGRFTISRDNSKNTLYLQMNSLKPEDTAVYYCAARRYGSRETDDYGYWGQGTQVTVSSAAATTTPAPRPPTPAPTIASQPLSLRPEACRPAAGGAVHTRGLDFACDIYIWAPLAGTCGVLLLSLVITLYCKRGRKKLLYIFKQPFMRPVQTTQEEDGCSCRFPEEEEGGCELRVKFSRSADAPAYQQGQNQLYNELNLGRREEYDVLDKRRGRDPEMGGKPRRKNPQEGLYNELQKDKMAEAYSEIGMKGERRRGKGHDGLYQGLSTATKDTYDALHMQALPPR

SEQ ID NO: 3679 - protein, 508 aa, synthetic construct
  REGION 1..508: note = Synthetic
MALPVTALLLPLALLLHAARPEVQLLESGGGLVQPGGSLRLSCAASGSVFSSYSMWFRQAPGKEREFVSAIITSGGSTYYADSVKGRFTISRDNSKNTLYLQMNSLKPEDTAVYYCVAVYGIGTGQYIGTYDIWGQGTQVTVSSGGGGSGGGGSGGGGSEVQLLESGGGLVQPGGSLRLSCAASGSVFSSYSMWFRQAPGKEREFVSAIITSGGSTYYADSVKGRFTISRDNSKNTLYLQMNSLKPEDTAVYYCVAVYGIGTGQYIGTYDIWGQGTQVTVSSAAATTTPAPRPPTPAPTIASQPLSLRPEACRPAAGGAVHTRGLDFACDIYIWAPLAGTCGVLLLSLVITLYCKRGRKKLLYIFKQPFMRPVQTTQEEDGCSCRFPEEEEGGCELRVKFSRSADAPAYQQGQNQLYNELNLGRREEYDVLDKRRGRDPEMGGKPRRKNPQEGLYNELQKDKMAEAYSEIGMKGERRRGKGHDGLYQGLSTATKDTYDALHMQALPPR

SEQ ID NO: 3680 - protein, 504 aa, synthetic construct
  REGION 1..504: note = Synthetic
MALPVTALLLPLALLLHAARPEVQLLESGGGLVQPGGSLRLSCAASGSLLSIYDMGWFRQAPGKEREFVSARIGKGGSTYYADSVKGRFTISRDNSKNTLYLQMNSLKPEDTAVYYCAVLVGEGESYGYHYWGQGTQVTVSSGGGGSGGGGSGGGGSEVQLLESGGGLVQPGGSLRLSCAASGSLLSIYDMGWFRQAPGKEREFVSARIGKGGSTYYADSVKGRFTISRDNSKNTLYLQMNSLKPEDTAVYYCAVLVGEGESYGYHYWGQGTQVTVSSAAATTTPAPRPPTPAPTIASQPLSLRPEACRPAAGGAVHTRGLDFACDIYIWAPLAGTCGVLLLSLVITLYCKRGRKKLLYIFKQPFMRPVQTTQEEDGCSCRFPEEEEGGCELRVKFSRSADAPAYQQGQNQLYNELNLGRREEYDVLDKRRGRDPEMGGKPRRKNPQEGLYNELQKDKMAEAYSEIGMKGERRRGKGHDGLYQGLSTATKDTYDALHMQALPPR

SEQ ID NO: 3681 - protein, 508 aa, synthetic construct
  REGION 1..508: note = Synthetic
MALPVTALLLPLALLLHAARPEVQLLESGGGLVQPGGSLRLSCAASGIGLSIYFMGWFRQAPGKEREFVSAIISSSGSTYYADSVKGRFTISRDNSKNTLYLQMNSLKPEDTAVYYCAARTGYSEYEQEDYGYWGQGTQVTVSSGGGGSGGGGSGGGGSEVQLLESGGGLVQPGGSLRLSCAASGIGLSIYFMGWFRQAPGKEREFVSAIISSSGSTYYADSVKGRFTISRDNSKNTLYLQMNSLKPEDTAVYYCAARTGYSEYEQEDYGYWGQGTQVTVSSAAATTTPAPRPPTPAPTIASQPLSLRPEACRPAAGGAVHTRGLDFACDIYIWAPLAGTCGVLLLSLVITLYCKRGRKKLLYIFKQPFMRPVQTTQEEDGCSCRFPEEEEGGCELRVKFSRSADAPAYQQGQNQLYNELNLGRREEYDVLDKRRGRDPEMGGKPRRKNPQEGLYNELQKDKMAEAYSEIGMKGERRRGKGHDGLYQGLSTATKDTYDALHMQALPPR

SEQ ID NO: 3682 - protein, 506 aa, synthetic construct
  REGION 1..506: note = Synthetic
MALPVTALLLPLALLLHAARPEVQLLESGGGLVQPGGSLRLSCAASGSIFSSSFIGWFRQAPGKEREFVSAVIASSGSTYYADSVKGRFTISRDNSKNTLYLQMNSLKPEDTAVYYCAGRFGQGGGTVEYGYWGQGTQVTVSSGGGGSGGGGSGGGGSEVQLLESGGGLVQPGGSLRLSCAASGSIFSSSFIGWFRQAPGKEREFVSAVIASSGSTYYADSVKGRFTISRDNSKNTLYLQMNSLKPEDTAVYYCAGRFGQGGGTVEYGYWGQGTQVTVSSAAATTTPAPRPPTPAPTIASQPLSLRPEACRPAAGGAVHTRGLDFACDIYIWAPLAGTCGVLLLSLVITLYCKRGRKKLLYIFKQPFMRPVQTTQEEDGCSCRFPEEEEGGCELRVKFSRSADAPAYQQGQNQLYNELNLGRREEYDVLDKRRGRDPEMGGKPRRKNPQEGLYNELQKDKMAEAYSEIGMKGERRRGKGHDGLYQGLSTATKDTYDALHMQALPPR

SEQ ID NO: 3683 - protein, 506 aa, synthetic construct
  REGION 1..506: note = Synthetic
MALPVTALLLPLALLLHAARPEVQLLESGGGLVQPGGSLRLSCAASGRVFSFYFMGWFRQAPGKEREFVSGVIGKTGSTYYTDSVKGRFTISRDNSKNTLYLQMNSLKPEDTAVYYCAASEYQGTGYGEFAYWGQGTQVTVSSGGGGSGGGGSGGGGSEVQLLESGGGLVQPGGSLRLSCAASGRVFSFYFMGWFRQAPGKEREFVSGVIGKTGSTYYTDSVKGRFTISRDNSKNTLYLQMNSLKPEDTAVYYCAASEYQGTGYGEFAYWGQGTQVTVSSAAATTTPAPRPPTPAPTIASQPLSLRPEACRPAAGGAVHTRGLDFACDIYIWAPLAGTCGVLLLSLVITLYCKRGRKKLLYIFKQPFMRPVQTTQEEDGCSCRFPEEEEGGCELRVKFSRSADAPAYQQGQNQLYNELNLGRREEYDVLDKRRGRDPEMGGKPRRKNPQEGLYNELQKDKMAEAYSEIGMKGERRRGKGHDGLYQGLSTATKDTYDALHMQALPPR

SEQ ID NO: 3684 - protein, 494 aa, synthetic construct
  REGION 1..494: note = Synthetic
MALPVTALLLPLALLLHAARPEVQLLESGGGLVQPGGSLRLSCAASGSLFEVEHIGWFRQAPGKEREFVSAQVTGGGYTYYADSVKGRFTISRDNSKNTLYLQMNSLKPEDTAVYYCYVRLVEEAYWGQGTQVTVSSGGGGSGGGGSGGGGSEVQLLESGGGLVQPGGSLRLSCAASGSLFEVEHIGWFRQAPGKEREFVSAQVTGGGYTYYADSVKGRFTISRDNSKNTLYLQMNSLKPEDTAVYYCYVRLVEEAYWGQGTQVTVSSAAATTTPAPRPPTPAPTIASQPLSLRPEACRPAAGGAVHTRGLDFACDIYIWAPLAGTCGVLLLSLVITLYCKRGRKKLLYIFKQPFMRPVQTTQEEDGCSCRFPEEEEGGCELRVKFSRSADAPAYQQGQNQLYNELNLGRREEYDVLDKRRGRDPEMGGKPRRKNPQEGLYNELQKDKMAEAYSEIGMKGERRRGKGHDGLYQGLSTATKDTYDALHMQALPPR

SEQ ID NO: 3685 - protein, 510 aa, synthetic construct
  REGION 1..510: note = Synthetic
MALPVTALLLPLALLLHAARPEVQLLESGGGLVQPGGSLRLSCAASGRIFGEYFIGWFRQAPGKEREFVSAIITGSGITHYADSVKGRFTISRDNSKNTLYLQMNSLKPEDTAVYYCAARTDYTTGQELPEYGYWGQGTQVTVSSGGGGSGGGGSGGGGSEVQLLESGGGLVQPGGSLRLSCAASGRIFGEYFIGWFRQAPGKEREFVSAIITGSGITHYADSVKGRFTISRDNSKNTLYLQMNSLKPEDTAVYYCAARTDYTTGQELPEYGYWGQGTQVTVSSAAATTTPAPRPPTPAPTIASQPLSLRPEACRPAAGGAVHTRGLDFACDIYIWAPLAGTCGVLLLSLVITLYCKRGRKKLLYIFKQPFMRPVQTTQEEDGCSCRFPEEEEGGCELRVKFSRSADAPAYQQGQNQLYNELNLGRREEYDVLDKRRGRDPEMGGKPRRKNPQEGLYNELQKDKMAEAYSEIGMKGERRRGKGHDGLYQGLSTATKDTYDALHMQALPPR

SEQ ID NO: 3686 - protein, 500 aa, synthetic construct
  REGION 1..500: note = Synthetic
MALPVTALLLPLALLLHAARPEVQLLESGGGLVQPGGSLRLSCAASGSIESIYFIGWFRQAPGKEREFVSAEFIPGGSTVYSDSVKGRFTISRDNSKNTLYLQMNSLKPEDTAVYYCNAGLDEGRYYTYWGQGTQVTVSSGGGGSGGGGSGGGGSEVQLLESGGGLVQPGGSLRLSCAASGSIESIYFIGWFRQAPGKEREFVSAEFIPGGSTVYSDSVKGRFTISRDNSKNTLYLQMNSLKPEDTAVYYCNAGLDEGRYYTYWGQGTQVTVSSAAATTTPAPRPPTPAPTIASQPLSLRPEACRPAAGGAVHTRGLDFACDIYIWAPLAGTCGVLLLSLVITLYCKRGRKKLLYIFKQPFMRPVQTTQEEDGCSCRFPEEEEGGCELRVKFSRSADAPAYQQGQNQLYNELNLGRREEYDVLDKRRGRDPEMGGKPRRKNPQEGLYNELQKDKMAEAYSEIGMKGERRRGKGHDGLYQGLSTATKDTYDALHMQALPPR

SEQ ID NO: 3687 - protein, 494 aa, synthetic construct
  REGION 1..494: note = Synthetic
MALPVTALLLPLALLLHAARPEVQLLESGGGLVQPGGSLRLSCAASGIEVSSSVVGWFRQAPGKEREFVSASGVGGSTYYADSVKGRFTISRDNSKNTLYLQMNSLKPEDTAVYYCYAVYLTIYTYWGQGTQVTVSSGGGGSGGGGSGGGGSEVQLLESGGGLVQPGGSLRLSCAASGIEVSSSVVGWFRQAPGKEREFVSASGVGGSTYYADSVKGRFTISRDNSKNTLYLQMNSLKPEDTAVYYCYAVYLTIYTYWGQGTQVTVSSAAATTTPAPRPPTPAPTIASQPLSLRPEACRPAAGGAVHTRGLDFACDIYIWAPLAGTCGVLLLSLVITLYCKRGRKKLLYIFKQPFMRPVQTTQEEDGCSCRFPEEEEGGCELRVKFSRSADAPAYQQGQNQLYNELNLGRREEYDVLDKRRGRDPEMGGKPRRKNPQEGLYNELQKDKMAEAYSEIGMKGERRRGKGHDGLYQGLSTATKDTYDALHMQALPPR

SEQ ID NO: 3688 - protein, 496 aa, synthetic construct
  REGION 1..496: note = Synthetic
MALPVTALLLPLALLLHAARPEVQLLESGGGLVQPGGSLRLSCAASGFTISRYAMAWFRQAPGKEREFVSGSIFVGGGTYYRDSVKGRFTISRDNSKNTLYLQMNSLKPEDTAVYYCYATVGDSYYYWGQGTQVTVSSGGGGSGGGGSGGGGSEVQLLESGGGLVQPGGSLRLSCAASGFTISRYAMAWFRQAPGKEREFVSGSIFVGGGTYYRDSVKGRFTISRDNSKNTLYLQMNSLKPEDTAVYYCYATVGDSYYYWGQGTQVTVSSAAATTTPAPRPPTPAPTIASQPLSLRPEACRPAAGGAVHTRGLDFACDIYIWAPLAGTCGVLLLSLVITLYCKRGRKKLLYIFKQPFMRPVQTTQEEDGCSCRFPEEEEGGCELRVKFSRSADAPAYQQGQNQLYNELNLGRREEYDVLDKRRGRDPEMGGKPRRKNPQEGLYNELQKDKMAEAYSEIGMKGERRRGKGHDGLYQGLSTATKDTYDALHMQALPPR

SEQ ID NO: 3689 - protein, 494 aa, synthetic construct
  REGION 1..494: note = Synthetic
MALPVTALLLPLALLLHAARPEVQLLESGGGLVQPGGSLRLSCAASGSLFSVEHIGWFRQAPGKEREFVSAQVTGGGYTYYADSVKGRFTISRDNSKNTLYLQMNSLKPEDTAVYYCYVRLVEEAYWGQGTQVTVSSGGGGSGGGGSGGGGSEVQLLESGGGLVQPGGSLRLSCAASGSLFSVEHIGWFRQAPGKEREFVSAQVTGGGYTYYADSVKGRFTISRDNSKNTLYLQMNSLKPEDTAVYYCYVRLVEEAYWGQGTQVTVSSAAATTTPAPRPPTPAPTIASQPLSLRPEACRPAAGGAVHTRGLDFACDIYIWAPLAGTCGVLLLSLVITLYCKRGRKKLLYIFKQPFMRPVQTTQEEDGCSCRFPEEEEGGCELRVKFSRSADAPAYQQGQNQLYNELNLGRREEYDVLDKRRGRDPEMGGKPRRKNPQEGLYNELQKDKMAEAYSEIGMKGERRRGKGHDGLYQGLSTATKDTYDALHMQALPPR

SEQ ID NO: 3690 - protein, 496 aa, synthetic construct
  REGION 1..496: note = Synthetic
MALPVTALLLPLALLLHAARPEVQLLESGGGLVQPGGSLRLSCAASGFIFSIYDMGWFRQAPGKEREFVSAISTTGGSIYYADSVKGRFTISRDNSKNTLYLQMNSLKPEDTAVYYCNADPLESYGYWGQGTQVTVSSGGGGSGGGGSGGGGSEVQLLESGGGLVQPGGSLRLSCAASGFIFSIYDMGWFRQAPGKEREFVSAISTTGGSIYYADSVKGRFTISRDNSKNTLYLQMNSLKPEDTAVYYCNADPLESYGYWGQGTQVTVSSAAATTTPAPRPPTPAPTIASQPLSLRPEACRPAAGGAVHTRGLDFACDIYIWAPLAGTCGVLLLSLVITLYCKRGRKKLLYIFKQPFMRPVQTTQEEDGCSCRFPEEEEGGCELRVKFSRSADAPAYQQGQNQLYNELNLGRREEYDVLDKRRGRDPEMGGKPRRKNPQEGLYNELQKDKMAEAYSEIGMKGERRRGKGHDGLYQGLSTATKDTYDALHMQALPPR

SEQ ID NO: 3691 - protein, 500 aa, synthetic construct
  REGION 1..500: note = Synthetic
MALPVTALLLPLALLLHAARPEVQLLESGGGLVQPGGSLRLSCAASGSVFSSYFIGWFRQAPGKEREFVSAVISSSGSTYYADSVKGRFTISRDNSKNTLYLQMNSLKPEDTAVYYCVAREDVGEPYGYWGQGTQVTVSSGGGGSGGGGSGGGGSEVQLLESGGGLVQPGGSLRLSCAASGSVFSSYFIGWFRQAPGKEREFVSAVISSSGSTYYADSVKGRFTISRDNSKNTLYLQMNSLKPEDTAVYYCVAREDVGEPYGYWGQGTQVTVSSAAATTTPAPRPPTPAPTIASQPLSLRPEACRPAAGGAVHTRGLDFACDIYIWAPLAGTCGVLLLSLVITLYCKRGRKKLLYIFKQPFMRPVQTTQEEDGCSCRFPEEEEGGCELRVKFSRSADAPAYQQGQNQLYNELNLGRREEYDVLDKRRGRDPEMGGKPRRKNPQEGLYNELQKDKMAEAYSEIGMKGERRRGKGHDGLYQGLSTATKDTYDALHMQALPPR

SEQ ID NO: 3692 - DNA, 1506 bp, synthetic construct
  misc_feature 1..1506: note = Synthetic
  source 1..1506: mol_type = other DNA
atggccttaccagtgaccgccttgctcctgccgctggccttgctgctccacgccgccaggccggaggtgcagctgttggagtctgggggaggcttggtacagcctggggggtccctgagactctcctgtgcagcctctggaaggggctttacaagctattacatgggatggttccgccaggctccagggaaggaacgggagttcgtctcagctgtgattttcccggagggttaccgctactacgcagactccgtgaagggccggttcaccatctccagagacaattccaagaacacgctgtatctgcaaatgaacagcctgaagcccgaggacacggccgtatattactgtgcgaaatacacaggtttcggtgaggacgcctatcgctactggggccaagggacccaggtcaccgtctcctcaggtggaggcggttcaggcggaggtggctctggcggtggcggatcggaggtgcagctgttggagtctgggggaggcttggtacagcctggggggtccctgagactctcctgtgcagcctctggaaggggctttacaagctattacatgggatggttccgccaggctccagggaaggaacgggagttcgtctcagctgtgattttcccggagggttaccgctactacgcagactccgtgaagggccggttcaccatctccagagacaattccaagaacacgctgtatctgcaaatgaacagcctgaagcccgaggacacggccgtatattactgtgcgaaatacacaggtttcggtgaggacgcctatcgctactggggccaagggacccaggtcaccgtctcctcagcggccgcaaccacgacgccagcgccgcggccaccaacaccggcgcccaccatcgcgtcgcagcccctgtccctgcgcccagaggcgtgccggccagcggcggggggcgcagtgcacacgagggggctggacttcgcctgtgatatctacatctgggcgcccttggccgggacttgtggggtccttctcctgtcactggttatcaccctttactgcaaacggggcagaaagaaactcctgtatatattcaaacaaccatttatgagaccagtacaaactactcaagaggaagatggctgtagctgccgatttccagaagaagaagaaggaggatgtgaactgagagtgaagttcagcaggagcgcagacgcccccgcgtaccagcagggccagaaccagctctataacgagctcaatctaggacgaagagaggagtacgatgttttggacaagagacgtggccgggaccctgagatggggggaaagccgagaaggaagaaccctcaggaaggcctgtacaatgaactgcagaaagataagatggcggaggcctacagtgagattgggatgaaaggcgagcgccggaggggcaaggggcacgatggcctttaccagggtctcagtacagccaccaaggacacctacgacgcccttcacatgcaggccctgccccctcgc

SEQ ID NO: 3693 - DNA, 1500 bp, synthetic construct
  misc_feature 1..1500: note = Synthetic
  source 1..1500: mol_type = other DNA
atggccttaccagtgaccgccttgctcctgccgctggccttgctgctccacgccgccaggccggaggtgcagctgttggagtctgggggaggcttggtacagcctggggggtccctgagactctcctgtgcagcctctggactcacctttagcatacatactgtgggatggttccgccaggctccagggaaggaaagagagttcgtctcagctgcactgggtagtgggggtcgaccttactaccgcgactccgtgaagggccggttcaccatctccagagacaattccaagaacacgctgtatctgcaaatgaacagcctgaaaccagaggacacggccgtatattactgttatgttgacgtggggacagggctgtactatggctactggggccaagggacccaggtcaccgtctcctcaggtggaggcggttcaggcggaggtggctctggcggtggcggatcggaggtgcagctgttggagtctgggggaggcttggtacagcctggggggtccctgagactctcctgtgcagcctctggactcacctttagcatacatactgtgggatggttccgccaggctccagggaaggaaagagagttcgtctcagctgcactgggtagtgggggtcgaccttactaccgcgactccgtgaagggccggttcaccatctccagagacaattccaagaacacgctgtatctgcaaatgaacagcctgaaaccagaggacacggccgtatattactgttatgttgacgtggggacagggctgtactatggctactggggccaagggacccaggtcaccgtctcctcagcggccgcaaccacgacgccagcgccgcggccaccaacaccggcgcccaccatcgcgtcgcagcccctgtccctgcgcccagaggcgtgccggccagcggcggggggcgcagtgcacacgagggggctggacttcgcctgtgatatctacatctgggcgcccttggccgggacttgtggggtccttctcctgtcactggttatcaccctttactgcaaacggggcagaaagaaactcctgtatatattcaaacaaccatttatgagaccagtacaaactactcaagaggaagatggctgtagctgccgatttccagaagaagaagaaggaggatgtgaactgagagtgaagttcagcaggagcgcagacgcccccgcgtaccagcagggccagaaccagctctataacgagctcaatctaggacgaagagaggagtacgatgttttggacaagagacgtggccgggaccctgagatggggggaaagccgagaaggaagaaccctcaggaaggcctgtacaatgaactgcagaaagataagatggcggaggcctacagtgagattgggatgaaaggcgagcgccggaggggcaaggggcacgatggcctttaccagggtctcagtacagccaccaaggacacctacgacgcccttcacatgcaggccctgccccctcgc

SEQ ID NO: 3694 - DNA, 1518 bp, synthetic construct
  misc_feature 1..1518: note = Synthetic
  source 1..1518: mol_type = other DNA
atggccttaccagtgaccgccttgctcctgccgctggccttgctgctccacgccgccaggccggaggtgcagctgttggagtctgggggaggcttggtacagcctggggggtccctgagactctcctgtgcagcctctggaaggatctttagcagctattttatggggtggtttcgccaggctccagggaaggaacgggagtttgtctcagcccatattagtagcgaaggtagcacatactacagagactccgtgaagggccggttcaccatctccagagacaattccaagaacacgctgtatctgcaaatgaacagcctgaaaccagaggacacggccgtatattactgtgcggcccgcgagtacgcggatacacagcgcggcgagtacgcttactggggccaagggacccaagtcaccgtctcctcaggtggaggcggttcaggcggaggtggctctggcggtggcggatcggaggtgcagctgttggagtctgggggaggcttggtacagcctggggggtccctgagactctcctgtgcagcctctggaaggatctttagcagctattttatggggtggtttcgccaggctccagggaaggaacgggagtttgtctcagcccatattagtagcgaaggtagcacatactacagagactccgtgaagggccggttcaccatctccagagacaattccaagaacacgctgtatctgcaaatgaacagcctgaaaccagaggacacggccgtatattactgtgcggcccgcgagtacgcggatacacagcgcggcgagtacgcttactggggccaagggacccaagtcaccgtctcctcagcggccgcaaccacgacgccagcgccgcggccaccaacaccggcgcccaccatcgcgtcgcagcccctgtccctgcgcccagaggcgtgccggccagcggcggggggcgcagtgcacacgagggggctggacttcgcctgtgatatctacatctgggcgcccttggccgggacttgtggggtccttctcctgtcactggttatcaccctttactgcaaacggggcagaaagaaactcctgtatatattcaaacaaccatttatgagaccagtacaaactactcaagaggaagatggctgtagctgccgatttccagaagaagaagaaggaggatgtgaactgagagtgaagttcagcaggagcgcagacgcccccgcgtaccagcagggccagaaccagctctataacgagctcaatctaggacgaagagaggagtacgatgttttggacaagagacgtggccgggaccctgagatggggggaaagccgagaaggaagaaccctcaggaaggcctgtacaatgaactgcagaaagataagatggcggaggcctacagtgagattgggatgaaaggcgagcgccggaggggcaaggggcacgatggcctttaccagggtctcagtacagccaccaaggacacctacgacgcccttcacatgcaggccctgccccctcgc

SEQ ID NO: 3695 - DNA, 1488 bp, synthetic construct
  misc_feature 1..1488: note = Synthetic
  source 1..1488: mol_type = other DNA
atggccttaccagtgaccgccttgctcctgccgctggccttgctgctccacgccgccaggccggaggtgcagctgttggagtctgggggaggcttggtacagcctggggggtccctgagactctcctgtgcagcctctggatctatagtcagcagctatgccatgggctggttccgccaggctccagggaaggaaagagagttcgtctcatccgctattggaaagggtggtgtaacaatttatgcagactccgtgaagggccggttcaccatctccagagataattccaagaacacgctgtatctgcaaatgaacagcctgaagccagaggacacggccgtatattactgtgcgacagatgagtctacttaccgtgactactggggccaagggacccaggtcaccgtctcctcaggtggaggcggttcaggcggaggtggctctggcggtggcggatcggaggtgcagctgttggagtctgggggaggcttggtacagcctggggggtccctgagactctcctgtgcagcctctggatctatagtcagcagctatgccatgggctggttccgccaggctccagggaaggaaagagagttcgtctcatccgctattggaaagggtggtgtaacaatttatgcagactccgtgaagggccggttcaccatctccagagataattccaagaacacgctgtatctgcaaatgaacagcctgaagccagaggacacggccgtatattactgtgcgacagatgagtctacttaccgtgactactggggccaagggacccaggtcaccgtctcctcagcggccgcaaccacgacgccagcgccgcggccaccaacaccggcgcccaccatcgcgtcgcagcccctgtccctgcgcccagaggcgtgccggccagcggcggggggcgcagtgcacacgagggggctggacttcgcctgtgatatctacatctgggcgcccttggccgggacttgtggggtccttctcctgtcactggttatcaccctttactgcaaacggggcagaaagaaactcctgtatatattcaaacaaccatttatgagaccagtacaaactactcaagaggaagatggctgtagctgccgatttccagaagaagaagaaggaggatgtgaactgagagtgaagttcagcaggagcgcagacgcccccgcgtaccagcagggccagaaccagctctataacgagctcaatctaggacgaagagaggagtacgatgttttggacaagagacgtggccgggaccctgagatggggggaaagccgagaaggaagaaccctcaggaaggcctgtacaatgaactgcagaaagataagatggcggaggcctacagtgagattgggatgaaaggcgagcgccggaggggcaaggggcacgatggcctttaccagggtctcagtacagccaccaaggacacctacgacgcccttcacatgcaggccctgccccctcgc

SEQ ID NO: 3696 - DNA, 1482 bp, synthetic construct
  misc_feature 1..1482: note = Synthetic
  source 1..1482: mol_type = other DNA
atggccttaccagtgaccgccttgctcctgccgctggccttgctgctccacgccgccaggccggaggtgcagctgttggagtctgggggaggcttggtacagcctggggggtccctgagactctcctgtgcagcctctggatcactatttcaggtggagcacatcgggtggtttcgccaggctccagggaaggaaagagatttcgtctcagctcaagtcaccggtggcggttatacatactacgcagactccgtgaagggccggttcaccatctccagagacaattccaagaacacgctgtatctgcaaatgaacagcctgaaaccggaggacacggccgtatattactgttacgtacggctcgtggaagaagcatactggggccaagggacccaagtcaccgtctcctcaggtggaggcggttcaggcggaggtggctctggcggtggcggatcggaggtgcagctgttggagtctgggggaggcttggtacagcctggggggtccctgagactctcctgtgcagcctctggatcactatttcaggtggagcacatcgggtggtttcgccaggctccagggaaggaaagagatttcgtctcagctcaagtcaccggtggcggttatacatactacgcagactccgtgaagggccggttcaccatctccagagacaattccaagaacacgctgtatctgcaaatgaacagcctgaaaccggaggacacggccgtatattactgttacgtacggctcgtggaagaagcatactggggccaagggacccaagtcaccgtctcctcagcggccgcaaccacgacgccagcgccgcggccaccaacaccggcgcccaccatcgcgtcgcagcccctgtccctgcgcccagaggcgtgccggccagcggcggggggcgcagtgcacacgagggggctggacttcgcctgtgatatctacatctgggcgcccttggccgggacttgtggggtccttctcctgtcactggttatcaccctttactgcaaacggggcagaaagaaactcctgtatatattcaaacaaccatttatgagaccagtacaaactactcaagaggaagatggctgtagctgccgatttccagaagaagaagaaggaggatgtgaactgagagtgaagttcagcaggagcgcagacgcccccgcgtaccagcagggccagaaccagctctataacgagctcaatctaggacgaagagaggagtacgatgttttggacaagagacgtggccgggaccctgagatggggggaaagccgagaaggaagaaccctcaggaaggcctgtacaatgaactgcagaaagataagatggcggaggcctacagtgagattgggatgaaaggcgagcgccggaggggcaaggggcacgatggcctttaccagggtctcagtacagccaccaaggacacctacgacgcccttcacatgcaggccctgccccctcgc

SEQ ID NO: 3697 - DNA, 1518 bp, synthetic construct
  misc_feature 1..1518: note = Synthetic
  source 1..1518: mol_type = other DNA
atggccttaccagtgaccgccttgctcctgccgctggccttgctgctccacgccgccaggccggaggtgcagctgttggagtctgggggaggcttggtacagcctggggggtccctgagactctcctgtgcagcctctggaacaacctttgccagctctttcatgggatggttccgccaggctccagggaaggagcgcgagtttgtctcagctattgtttttccggggggtagcacatactacgcagactccgtgaagggccggttcaccatctccagagacaattccaagaacacgctgtatctgcaaatgaacagcctgaagcctgaggacacggccgtatattactgtgcggctagaagatatgagttggtggacaggctggagtacgcctactggggccaagggacccaggtcaccgtctcctcaggtggaggcggttcaggcggaggtggctctggcggtggcggatcggaggtgcagctgttggagtctgggggaggcttggtacagcctggggggtccctgagactctcctgtgcagcctctggaacaacctttgccagctctttcatgggatggttccgccaggctccagggaaggagcgcgagtttgtctcagctattgtttttccggggggtagcacatactacgcagactccgtgaagggccggttcaccatctccagagacaattccaagaacacgctgtatctgcaaatgaacagcctgaagcctgaggacacggccgtatattactgtgcggctagaagatatgagttggtggacaggctggagtacgcctactggggccaagggacccaggtcaccgtctcctcagcggccgcaaccacgacgccagcgccgcggccaccaacaccggcgcccaccatcgcgtcgcagcccctgtccctgcgcccagaggcgtgccggccagcggcggggggcgcagtgcacacgagggggctggacttcgcctgtgatatctacatctgggcgcccttggccgggacttgtggggtccttctcctgtcactggttatcaccctttactgcaaacggggcagaaagaaactcctgtatatattcaaacaaccatttatgagaccagtacaaactactcaagaggaagatggctgtagctgccgatttccagaagaagaagaaggaggatgtgaactgagagtgaagttcagcaggagcgcagacgcccccgcgtaccagcagggccagaaccagctctataacgagctcaatctaggacgaagagaggagtacgatgttttggacaagagacgtggccgggaccctgagatggggggaaagccgagaaggaagaaccctcaggaaggcctgtacaatgaactgcagaaagataagatggcggaggcctacagtgagattgggatgaaaggcgagcgccggaggggcaaggggcacgatggcctttaccagggtctcagtacagccaccaaggacacctacgacgcccttcacatgcaggccctgccccctcgc

SEQ ID NO: 3698 - DNA, 1488 bp, synthetic construct
  misc_feature 1..1488: note = Synthetic
  source 1..1488: mol_type = other DNA
atggccttaccagtgaccgccttgctcctgccgctggccttgctgctccacgccgccaggccggaggtgcagctgttggagtctgggggaggcttggtacagcctggggggtccctgagactctcctgtgcagcctctggaagcgtgtttagcagctttactattgggtggtttcgccaggctccagggaaggagcgcgagtttgtctcagctattgtcactagcaccggtagtacatactatgcagactccgtgaagggccggttcaccatctccagagacaattccaagaacacgctgtatctgcaaatgaacagcctgaaaccggaggacacggccgtatattactgtaatgtgaggacacaggaggactattactactggggccaagggacccaggtcaccgtctcctcaggtggaggcggttcaggcggaggtggctctggcggtggcggatcggaggtgcagctgttggagtctgggggaggcttggtacagcctggggggtccctgagactctcctgtgcagcctctggaagcgtgtttagcagctttactattgggtggtttcgccaggctccagggaaggagcgcgagtttgtctcagctattgtcactagcaccggtagtacatactatgcagactccgtgaagggccggttcaccatctccagagacaattccaagaacacgctgtatctgcaaatgaacagcctgaaaccggaggacacggccgtatattactgtaatgtgaggacacaggaggactattactactggggccaagggacccaggtcaccgtctcctcagcggccgcaaccacgacgccagcgccgcggccaccaacaccggcgcccaccatcgcgtcgcagcccctgtccctgcgcccagaggcgtgccggccagcggcggggggcgcagtgcacacgagggggctggacttcgcctgtgatatctacatctgggcgcccttggccgggacttgtggggtccttctcctgtcactggttatcaccctttactgcaaacggggcagaaagaaactcctgtatatattcaaacaaccatttatgagaccagtacaaactactcaagaggaagatggctgtagctgccgatttccagaagaagaagaaggaggatgtgaactgagagtgaagttcagcaggagcgcagacgcccccgcgtaccagcagggccagaaccagctctataacgagctcaatctaggacgaagagaggagtacgatgttttggacaagagacgtggccgggaccctgagatggggggaaagccgagaaggaagaaccctcaggaaggcctgtacaatgaactgcagaaagataagatggcggaggcctacagtgagattgggatgaaaggcgagcgccggaggggcaaggggcacgatggcctttaccagggtctcagtacagccaccaaggacacctacgacgcccttcacatgcaggccctgccccctcgc

SEQ ID NO: 3699 - DNA, 1518 bp, synthetic construct
  misc_feature 1..1518: note = Synthetic
  source 1..1518: mol_type = other DNA
atggccttaccagtgaccgccttgctcctgccgctggccttgctgctccacgccgccaggccggaggtgcagctgttggagtctgggggaggcttggtacagcctggggggtccctgagactctcctgtgcagcctctggaagcatttttggcagccacttcatgggctggtttcgccaggctccagggaaggagcgggagttcgtctcagctgcggttaccagcggaggtagtacatactatgcagactccgtgaagggccggttcaccatctccagagacaattccaagaacacgctgtatctgcaaatgaacagcctgaaacctgaggacacggccgtatattactgtgcggctcgaacctaccagtcaacgtatcagcctgaatatgcctactggggccaagggacccaggtcaccgtctcctcaggtggaggcggttcaggcggaggtggctctggcggtggcggatcggaggtgcagctgttggagtctgggggaggcttggtacagcctggggggtccctgagactctcctgtgcagcctctggaagcatttttggcagccacttcatgggctggtttcgccaggctccagggaaggagcgggagttcgtctcagctgcggttaccagcggaggtagtacatactatgcagactccgtgaagggccggttcaccatctccagagacaattccaagaacacgctgtatctgcaaatgaacagcctgaaacctgaggacacggccgtatattactgtgcggctcgaacctaccagtcaacgtatcagcctgaatatgcctactggggccaagggacccaggtcaccgtctcctcagcggccgcaaccacgacgccagcgccgcggccaccaacaccggcgcccaccatcgcgtcgcagcccctgtccctgcgcccagaggcgtgccggccagcggcggggggcgcagtgcacacgagggggctggacttcgcctgtgatatctacatctgggcgcccttggccgggacttgtggggtccttctcctgtcactggttatcaccctttactgcaaacggggcagaaagaaactcctgtatatattcaaacaaccatttatgagaccagtacaaactactcaagaggaagatggctgtagctgccgatttccagaagaagaagaaggaggatgtgaactgagagtgaagttcagcaggagcgcagacgcccccgcgtaccagcagggccagaaccagctctataacgagctcaatctaggacgaagagaggagtacgatgttttggacaagagacgtggccgggaccctgagatggggggaaagccgagaaggaagaaccctcaggaaggcctgtacaatgaactgcagaaagataagatggcggaggcctacagtgagattgggatgaaaggcgagcgccggaggggcaaggggcacgatggcctttaccagggtctcagtacagccaccaaggacacctacgacgcccttcacatgcaggccctgccccctcgc

SEQ ID NO: 3700 - DNA, 1530 bp, synthetic construct
  misc_feature 1..1530: note = Synthetic
  source 1..1530: mol_type = other DNA
atggccttaccagtgaccgccttgctcctgccgctggccttgctgctccacgccgccaggccggaggtgcagctgttggagtctgggggaggcttggtacagcctggggggtccctgagactctcctgtgcagcctctggatctatctttagcatcctggacatcgggtggttccgccaggctccagggaaggaacgagagttcgtctcagcctatattagcagcggtggtagtacatactattccgactccgtgaagggccggttcaccatctccagagataattccaagaacacgctgtatctgcaaatgaacagcctgaagccagaggacacggccgtatattactgtgtggctaccatctttggtgatcgtaccgagggccaggaaaggtacgctttctggggccaagggacccaagtcaccgtctcctcaggtggaggcggttcaggcggaggtggctctggcggtggcggatcggaggtgcagctgttggagtctgggggaggcttggtacagcctggggggtccctgagactctcctgtgcagcctctggatctatctttagcatcctggacatcgggtggttccgccaggctccagggaaggaacgagagttcgtctcagcctatattagcagcggtggtagtacatactattccgactccgtgaagggccggttcaccatctccagagataattccaagaacacgctgtatctgcaaatgaacagcctgaagccagaggacacggccgtatattactgtgtggctaccatctttggtgatcgtaccgagggccaggaaaggtacgctttctggggccaagggacccaagtcaccgtctcctcagcggccgcaaccacgacgccagcgccgcggccaccaacaccggcgcccaccatcgcgtcgcagcccctgtccctgcgcccagaggcgtgccggccagcggcggggggcgcagtgcacacgagggggctggacttcgcctgtgatatctacatctgggcgcccttggccgggacttgtggggtccttctcctgtcactggttatcaccctttactgcaaacggggcagaaagaaactcctgtatatattcaaacaaccatttatgagaccagtacaaactactcaagaggaagatggctgtagctgccgatttccagaagaagaagaaggaggatgtgaactgagagtgaagttcagcaggagcgcagacgcccccgcgtaccagcagggccagaaccagctctataacgagctcaatctaggacgaagagaggagtacgatgttttggacaagagacgtggccgggaccctgagatggggggaaagccgagaaggaagaaccctcaggaaggcctgtacaatgaactgcagaaagataagatggcggaggcctacagtgagattgggatgaaaggcgagcgccggaggggcaaggggcacgatggcctttaccagggtctcagtacagccaccaaggacacctacgacgcccttcacatgcaggccctgccccctcgc

SEQ ID NO: 3701 - DNA, 1518 bp, synthetic construct
  misc_feature 1..1518: note = Synthetic
  source 1..1518: mol_type = other DNA
atggccttaccagtgaccgccttgctcctgccgctggccttgctgctccacgccgccaggccggaggtgcagctgttggagtctgggggaggcttggtacagcctggggggtccctgagactctcctgtgcagcctctggaagcaccacgagcagctattttatgggatggttccgccaggctccagggaaggaacgcgagtttgtctcagctattataactagcagtggtagtccctactatgcagactccgtgaagggccggttcaccatctccagagacaattccaagaacacgctgtatctgcaaatgaacagcctgaaacccgaggacacggccgtatattactgtgcggcgcgtcggtatgggtcgagggaaacggacgactatgggtactggggccaagggacccaggtcaccgtctcctcaggtggaggcggttcaggcggaggtggctctggcggtggcggatcggaggtgcagctgttggagtctgggggaggcttggtacagcctggggggtccctgagactctcctgtgcagcctctggaagcaccacgagcagctattttatgggatggttccgccaggctccagggaaggaacgcgagtttgtctcagctattataactagcagtggtagtccctactatgcagactccgtgaagggccggttcaccatctccagagacaattccaagaacacgctgtatctgcaaatgaacagcctgaaacccgaggacacggccgtatattactgtgcggcgcgtcggtatgggtcgagggaaacggacgactatgggtactggggccaagggacccaggtcaccgtctcctcagcggccgcaaccacgacgccagcgccgcggccaccaacaccggcgcccaccatcgcgtcgcagcccctgtccctgcgcccagaggcgtgccggccagcggcggggggcgcagtgcacacgagggggctggacttcgcctgtgatatctacatctgggcgcccttggccgggacttgtggggtccttctcctgtcactggttatcaccctttactgcaaacggggcagaaagaaactcctgtatatattcaaacaaccatttatgagaccagtacaaactactcaagaggaagatggctgtagctgccgatttccagaagaagaagaaggaggatgtgaactgagagtgaagttcagcaggagcgcagacgcccccgcgtaccagcagggccagaaccagctctataacgagctcaatctaggacgaagagaggagtacgatgttttggacaagagacgtggccgggaccctgagatggggggaaagccgagaaggaagaaccctcaggaaggcctgtacaatgaactgcagaaagataagatggcggaggcctacagtgagattgggatgaaaggcgagcgccggaggggcaaggggcacgatggcctttaccagggtctcagtacagccaccaaggacacctacgacgcccttcacatgcaggccctgccccctcgc

SEQ ID NO: 3702 - DNA, 1524 bp, synthetic construct
  misc_feature 1..1524: note = Synthetic
  source 1..1524: mol_type = other DNA
atggccttaccagtgaccgccttgctcctgccgctggccttgctgctccacgccgccaggccggaggtgcagctgttggagtctgggggaggcttggtacagcctggggggtccctgagactctcctgtgcagcctctggatctgtctttagcagctatagcatgtggtttcgccaggctccagggaaggaacgcgagtttgtctcagctattatcactagtggcggtagcacatactacgcagactccgtgaagggccggttcaccatctccagagacaattccaagaacacgctgtatctgcaaatgaacagcctgaaacccgaggacacggccgtatattactgtgtggccgtttacggcataggaactggacaatacatcggtacatatgacatctggggccaagggacccaggtcaccgtctcctcaggtggaggcggttcaggcggaggtggctctggcggtggcggatcggaggtgcagctgttggagtctgggggaggcttggtacagcctggggggtccctgagactctcctgtgcagcctctggatctgtctttagcagctatagcatgtggtttcgccaggctccagggaaggaacgcgagtttgtctcagctattatcactagtggcggtagcacatactacgcagactccgtgaagggccggttcaccatctccagagacaattccaagaacacgctgtatctgcaaatgaacagcctgaaacccgaggacacggccgtatattactgtgtggccgtttacggcataggaactggacaatacatcggtacatatgacatctggggccaagggacccaggtcaccgtctcctcagcggccgcaaccacgacgccagcgccgcggccaccaacaccggcgcccaccatcgcgtcgcagcccctgtccctgcgcccagaggcgtgccggccagcggcggggggcgcagtgcacacgagggggctggacttcgcctgtgatatctacatctgggcgcccttggccgggacttgtggggtccttctcctgtcactggttatcaccctttactgcaaacggggcagaaagaaactcctgtatatattcaaacaaccatttatgagaccagtacaaactactcaagaggaagatggctgtagctgccgatttccagaagaagaagaaggaggatgtgaactgagagtgaagttcagcaggagcgcagacgcccccgcgtaccagcagggccagaaccagctctataacgagctcaatctaggacgaagagaggagtacgatgttttggacaagagacgtggccgggaccctgagatggggggaaagccgagaaggaagaaccctcaggaaggcctgtacaatgaactgcagaaagataagatggcggaggcctacagtgagattgggatgaaaggcgagcgccggaggggcaaggggcacgatggcctttaccagggtctcagtacagccaccaaggacacctacgacgcccttcacatgcaggccctgccccctcgc

SEQ ID NO: 3703 - DNA, 1512 bp, synthetic construct
  misc_feature 1..1512: note = Synthetic
  source 1..1512: mol_type = other DNA
atggccttaccagtgaccgccttgctcctgccgctggccttgctgctccacgccgccaggccggaggtgcagctgttggagtctgggggaggcttggtacagcctggggggtccctgagactctcctgtgcagcctctggatccctactgagcatttatgatatgggctggtttcgccaggctccagggaaggagcgagagttcgtctcagcccgtattggcaaaggtggtagtacatactatgcagactccgtgaagggccggttcaccatctccagagataattccaagaacacgctgtatctgcaaatgaacagcctgaaaccggaggacacggccgtatattactgtgcggttctggttggtgagggtgaatcttacggctatcactactggggccaagggacccaggtcaccgtctcctcaggtggaggcggttcaggcggaggtggctctggcggtggcggatcggaggtgcagctgttggagtctgggggaggcttggtacagcctggggggtccctgagactctcctgtgcagcctctggatccctactgagcatttatgatatgggctggtttcgccaggctccagggaaggagcgagagttcgtctcagcccgtattggcaaaggtggtagtacatactatgcagactccgtgaagggccggttcaccatctccagagataattccaagaacacgctgtatctgcaaatgaacagcctgaaaccggaggacacggccgtatattactgtgcggttctggttggtgagggtgaatcttacggctatcactactggggccaagggacccaggtcaccgtctcctcagcggccgcaaccacgacgccagcgccgcggccaccaacaccggcgcccaccatcgcgtcgcagcccctgtccctgcgcccagaggcgtgccggccagcggcggggggcgcagtgcacacgagggggctggacttcgcctgtgatatctacatctgggcgcccttggccgggacttgtggggtccttctcctgtcactggttatcaccctttactgcaaacggggcagaaagaaactcctgtatatattcaaacaaccatttatgagaccagtacaaactactcaagaggaagatggctgtagctgccgatttccagaagaagaagaaggaggatgtgaactgagagtgaagttcagcaggagcgcagacgcccccgcgtaccagcagggccagaaccagctctataacgagctcaatctaggacgaagagaggagtacgatgttttggacaagagacgtggccgggaccctgagatggggggaaagccgagaaggaagaaccctcaggaaggcctgtacaatgaactgcagaaagataagatggcggaggcctacagtgagattgggatgaaaggcgagcgccggaggggcaaggggcacgatggcctttaccagggtctcagtacagccaccaaggacacctacgacgcccttcacatgcaggccctgccccctcgc

SEQ ID NO: 3704 - DNA, 1524 bp, synthetic construct
  misc_feature 1..1524: note = Synthetic
  source 1..1524: mol_type = other DNA
atggccttaccagtgaccgccttgctcctgccgctggccttgctgctccacgccgccaggccggaggtgcagctgttggagtctgggggaggcttggtacagcctggggggtccctgagactctcctgtgcagcctctggaattggcctgagcatatatttcatgggatggtttcgccaggctccagggaaggagcgcgagtttgtctcagctattattagttctagtggtagcacatactacgcagactccgtgaagggccggttcaccatctccagagacaattccaagaacacgctgtatctgcaaatgaacagcctgaagccagaggacacggccgtatattactgtgcggctcgaaccggctactctgaatacgagcaggaagactatggctactggggccaagggacccaagtcaccgtctcctcaggtggaggcggttcaggcggaggtggctctggcggtggcggatcggaggtgcagctgttggagtctgggggaggcttggtacagcctggggggtccctgagactctcctgtgcagcctctggaattggcctgagcatatatttcatgggatggtttcgccaggctccagggaaggagcgcgagtttgtctcagctattattagttctagtggtagcacatactacgcagactccgtgaagggccggttcaccatctccagagacaattccaagaacacgctgtatctgcaaatgaacagcctgaagccagaggacacggccgtatattactgtgcggctcgaaccggctactctgaatacgagcaggaagactatggctactggggccaagggacccaagtcaccgtctcctcagcggccgcaaccacgacgccagcgccgcggccaccaacaccggcgcccaccatcgcgtcgcagcccctgtccctgcgcccagaggcgtgccggccagcggcggggggcgcagtgcacacgagggggctggacttcgcctgtgatatctacatctgggcgcccttggccgggacttgtggggtccttctcctgtcactggttatcaccctttactgcaaacggggcagaaagaaactcctgtatatattcaaacaaccatttatgagaccagtacaaactactcaagaggaagatggctgtagctgccgatttccagaagaagaagaaggaggatgtgaactgagagtgaagttcagcaggagcgcagacgcccccgcgtaccagcagggccagaaccagctctataacgagctcaatctaggacgaagagaggagtacgatgttttggacaagagacgtggccgggaccctgagatggggggaaagccgagaaggaagaaccctcaggaaggcctgtacaatgaactgcagaaagataagatggcggaggcctacagtgagattgggatgaaaggcgagcgccggaggggcaaggggcacgatggcctttaccagggtctcagtacagccaccaaggacacctacgacgcccttcacatgcaggccctgccccctcgc

SEQ ID NO: 3705 - DNA, 1518 bp, synthetic construct
  misc_feature 1..1518: note = Synthetic
  source 1..1518: mol_type = other DNA
atggccttaccagtgaccgccttgctcctgccgctggccttgctgctccacgccgccaggccggaggtgcagctgttggagtctgggggaggcttggtacagcctggggggtccctgagactctcctgtgcagcctctggaagcatttttagcagctccttcatcggatggttccgccaggctccagggaaggagcgggagtttgtctcagctgtcattgctagcagtggtagtacatactatgcagactccgtgaagggccggttcaccatctccagagacaattccaagaacacgctgtatctgcaaatgaacagcctgaaaccagaggacacggccgtatattactgtgcgggccggttcgggcaggggggggggaccgtggaatatggctactggggccaagggacccaagtcaccgtctcctcaggtggaggcggttcaggcggaggtggctctggcggtggcggatcggaggtgcagctgttggagtctgggggaggcttggtacagcctggggggtccctgagactctcctgtgcagcctctggaagcatttttagcagctccttcatcggatggttccgccaggctccagggaaggagcgggagtttgtctcagctgtcattgctagcagtggtagtacatactatgcagactccgtgaagggccggttcaccatctccagagacaattccaagaacacgctgtatctgcaaatgaacagcctgaaaccagaggacacggccgtatattactgtgcgggccggttcgggcaggggggggggaccgtggaatatggctactggggccaagggacccaagtcaccgtctcctcagcggccgcaaccacgacgccagcgccgcggccaccaacaccggcgcccaccatcgcgtcgcagcccctgtccctgcgcccagaggcgtgccggccagcggcggggggcgcagtgcacacgagggggctggacttcgcctgtgatatctacatctgggcgcccttggccgggacttgtggggtccttctcctgtcactggttatcaccctttactgcaaacggggcagaaagaaactcctgtatatattcaaacaaccatttatgagaccagtacaaactactcaagaggaagatggctgtagctgccgatttccagaagaagaagaaggaggatgtgaactgagagtgaagttcagcaggagcgcagacgcccccgcgtaccagcagggccagaaccagctctataacgagctcaatctaggacgaagagaggagtacgatgttttggacaagagacgtggccgggaccctgagatggggggaaagccgagaaggaagaaccctcaggaaggcctgtacaatgaactgcagaaagataagatggcggaggcctacagtgagattgggatgaaaggcgagcgccggaggggcaaggggcacgatggcctttaccagggtctcagtacagccaccaaggacacctacgacgcccttcacatgcaggccctgccccctcgc

SEQ ID NO: 3706 - DNA, 1518 bp, synthetic construct
  misc_feature 1..1518: note = Synthetic
  source 1..1518: mol_type = other DNA
atggccttaccagtgaccgccttgctcctgccgctggccttgctgctccacgccgccaggccggaggtgcagctgttggagtctgggggaggcttggtacagcctggggggtccctgagactctcctgtgcagcctctggacgagtgtttagcttctattttatggggtggttccgccaggctccagggaaggaaagggagttcgtcagtggcgttattggcaaaaccggtagtacatactatactgactccgtgaagggccggttcaccatctccagagataattccaagaacacgctgtatctgcaaatgaacagcctgaaacccgaggacacggccgtatattactgtgcggccagtgaataccaaggtaccgggtacggagaatttgcatactggggccaagggacccaggtcaccgtctcctcaggtggaggcggttcaggcggaggtggctctggcggtggcggatcggaggtgcagctgttggagtctgggggaggcttggtacagcctggggggtccctgagactctcctgtgcagcctctggacgagtgtttagcttctattttatggggtggttccgccaggctccagggaaggaaagggagttcgtcagtggcgttattggcaaaaccggtagtacatactatactgactccgtgaagggccggttcaccatctccagagataattccaagaacacgctgtatctgcaaatgaacagcctgaaacccgaggacacggccgtatattactgtgcggccagtgaataccaaggtaccgggtacggagaatttgcatactggggccaagggacccaggtcaccgtctcctcagcggccgcaaccacgacgccagcgccgcggccaccaacaccggcgcccaccatcgcgtcgcagcccctgtccctgcgcccagaggcgtgccggccagcggcggggggcgcagtgcacacgagggggctggacttcgcctgtgatatctacatctgggcgcccttggccgggacttgtggggtccttctcctgtcactggttatcaccctttactgcaaacggggcagaaagaaactcctgtatatattcaaacaaccatttatgagaccagtacaaactactcaagaggaagatggctgtagctgccgatttccagaagaagaagaaggaggatgtgaactgagagtgaagttcagcaggagcgcagacgcccccgcgtaccagcagggccagaaccagctctataacgagctcaatctaggacgaagagaggagtacgatgttttggacaagagacgtggccgggaccctgagatggggggaaagccgagaaggaagaaccctcaggaaggcctgtacaatgaactgcagaaagataagatggcggaggcctacagtgagattgggatgaaaggcgagcgccggaggggcaaggggcacgatggcctttaccagggtctcagtacagccaccaaggacacctacgacgcccttcacatgcaggccctgccccctcgc

SEQ ID NO: 3707 - DNA, 1482 bp, synthetic construct
  misc_feature 1..1482: note = Synthetic
  source 1..1482: mol_type = other DNA
atggccttaccagtgaccgccttgctcctgccgctggccttgctgctccacgccgccaggccggaggtgcagctgttggagtctgggggaggcttggtacagcctggggggtccctgagactctcctgtgcagcctctggaagtttgtttgaagtcgaacacatcggatggttccgccaggctccagggaaggagagggagtttgtctcagctcaagtgaccggtggcggttatacatactacgcagactccgtgaagggccggttcaccatctccagagacaattccaagaacacgctgtatctgcaaatgaacagcctgaaaccggaggacacggccgtatattactgttacgtccggcttgtggaggaagcctactggggccaagggacccaagtcaccgtctcctcaggtggaggcggttcaggcggaggtggctctggcggtggcggatcggaggtgcagctgttggagtctgggggaggcttggtacagcctggggggtccctgagactctcctgtgcagcctctggaagtttgtttgaagtcgaacacatcggatggttccgccaggctccagggaaggagagggagtttgtctcagctcaagtgaccggtggcggttatacatactacgcagactccgtgaagggccggttcaccatctccagagacaattccaagaacacgctgtatctgcaaatgaacagcctgaaaccggaggacacggccgtatattactgttacgtccggcttgtggaggaagcctactggggccaagggacccaagtcaccgtctcctcagcggccgcaaccacgacgccagcgccgcggccaccaacaccggcgcccaccatcgcgtcgcagcccctgtccctgcgcccagaggcgtgccggccagcggcggggggcgcagtgcacacgagggggctggacttcgcctgtgatatctacatctgggcgcccttggccgggacttgtggggtccttctcctgtcactggttatcaccctttactgcaaacggggcagaaagaaactcctgtatatattcaaacaaccatttatgagaccagtacaaactactcaagaggaagatggctgtagctgccgatttccagaagaagaagaaggaggatgtgaactgagagtgaagttcagcaggagcgcagacgcccccgcgtaccagcagggccagaaccagctctataacgagctcaatctaggacgaagagaggagtacgatgttttggacaagagacgtggccgggaccctgagatggggggaaagccgagaaggaagaaccctcaggaaggcctgtacaatgaactgcagaaagataagatggcggaggcctacagtgagattgggatgaaaggcgagcgccggaggggcaaggggcacgatggcctttaccagggtctcagtacagccaccaaggacacctacgacgcccttcacatgcaggccctgccccctcgc

SEQ ID NO: 3708 - DNA, 1530 bp, synthetic construct
  misc_feature 1..1530: note = Synthetic
  source 1..1530: mol_type = other DNA
atggccttaccagtgaccgccttgctcctgccgctggccttgctgctccacgccgccaggccggaggtgcagctgttggagtctgggggaggcttggtacagcctggggggtccctgagactctcctgtgcagcctctggacggatttttggagagtattttatcggatggttccgccaggctccagggaaggagcgggagttcgtctcagctattatcaccggcagtggtattacacactacgcagactccgtgaagggccggttcaccatctccagagacaattccaagaacacgctgtatctgcaaatgaacagcctgaaaccggaggacacggccgtatattactgtgcggcgcgcacagactacactacaggccaggaactaccagaatacgggtactggggccaagggacccaggtcaccgtctcctcaggtggaggcggttcaggcggaggtggctctggcggtggcggatcggaggtgcagctgttggagtctgggggaggcttggtacagcctggggggtccctgagactctcctgtgcagcctctggacggatttttggagagtattttatcggatggttccgccaggctccagggaaggagcgggagttcgtctcagctattatcaccggcagtggtattacacactacgcagactccgtgaagggccggttcaccatctccagagacaattccaagaacacgctgtatctgcaaatgaacagcctgaaaccggaggacacggccgtatattactgtgcggcgcgcacagactacactacaggccaggaactaccagaatacgggtactggggccaagggacccaggtcaccgtctcctcagcggccgcaaccacgacgccagcgccgcggccaccaacaccggcgcccaccatcgcgtcgcagcccctgtccctgcgcccagaggcgtgccggccagcggcggggggcgcagtgcacacgagggggctggacttcgcctgtgatatctacatctgggcgcccttggccgggacttgtggggtccttctcctgtcactggttatcaccctttactgcaaacggggcagaaagaaactcctgtatatattcaaacaaccatttatgagaccagtacaaactactcaagaggaagatggctgtagctgccgatttccagaagaagaagaaggaggatgtgaactgagagtgaagttcagcaggagcgcagacgcccccgcgtaccagcagggccagaaccagctctataacgagctcaatctaggacgaagagaggagtacgatgttttggacaagagacgtggccgggaccctgagatggggggaaagccgagaaggaagaaccctcaggaaggcctgtacaatgaactgcagaaagataagatggcggaggcctacagtgagattgggatgaaaggcgagcgccggaggggcaaggggcacgatggcctttaccagggtctcagtacagccaccaaggacacctacgacgcccttcacatgcaggccctgccccctcgc

SEQ ID NO: 3709 - DNA, 1500 bp, synthetic construct
  misc_feature 1..1500: note = Synthetic
  source 1..1500: mol_type = other DNA
atggccttaccagtgaccgccttgctcctgccgctggccttgctgctccacgccgccaggccggaggtgcagctgttggagtctgggggaggcttggtacagcctggggggtccctgagactctcctgtgcagcctctggatcaattgagagcatttatttcatcgggtggtttcgccaggctccagggaaggagagagagtttgtctcagctgaattcatcccaggaggtagcacagtgtactcagactccgtgaagggccggttcaccatctccagagacaattccaagaacacgctgtatctgcaaatgaacagcctgaaacccgaggacacggccgtatattactgtaacgccggcctagacgaagggcggtactacacctactggggccaagggacccaggtcaccgtctcctcaggtggaggcggttcaggcggaggtggctctggcggtggcggatcggaggtgcagctgttggagtctgggggaggcttggtacagcctggggggtccctgagactctcctgtgcagcctctggatcaattgagagcatttatttcatcgggtggtttcgccaggctccagggaaggagagagagtttgtctcagctgaattcatcccaggaggtagcacagtgtactcagactccgtgaagggccggttcaccatctccagagacaattccaagaacacgctgtatctgcaaatgaacagcctgaaacccgaggacacggccgtatattactgtaacgccggcctagacgaagggcggtactacacctactggggccaagggacccaggtcaccgtctcctcagcggccgcaaccacgacgccagcgccgcggccaccaacaccggcgcccaccatcgcgtcgcagcccctgtccctgcgcccagaggcgtgccggccagcggcggggggcgcagtgcacacgagggggctggacttcgcctgtgatatctacatctgggcgcccttggccgggacttgtggggtccttctcctgtcactggttatcaccctttactgcaaacggggcagaaagaaactcctgtatatattcaaacaaccatttatgagaccagtacaaactactcaagaggaagatggctgtagctgccgatttccagaagaagaagaaggaggatgtgaactgagagtgaagttcagcaggagcgcagacgcccccgcgtaccagcagggccagaaccagctctataacgagctcaatctaggacgaagagaggagtacgatgttttggacaagagacgtggccgggaccctgagatggggggaaagccgagaaggaagaaccctcaggaaggcctgtacaatgaactgcagaaagataagatggcggaggcctacagtgagattgggatgaaaggcgagcgccggaggggcaaggggcacgatggcctttaccagggtctcagtacagccaccaaggacacctacgacgcccttcacatgcaggccctgccccctcgc

SEQ ID NO: 3710 - DNA, 1482 bp, synthetic construct
  misc_feature 1..1482: note = Synthetic
  source 1..1482: mol_type = other DNA
atggccttaccagtgaccgccttgctcctgccgctggccttgctgctccacgccgccaggccggaggtgcagctgttggagtctgggggaggcttggtacagcctggggggtccctgagactctcctgtgcagcctctggaatagaggtcagcagcagtgtagtgggttggtttcgccaggctccagggaaggagcgggagtttgtctcagctagcggtgtgggaggtagcacatactacgcagactccgtgaagggccggttcaccatctccagagacaattccaagaacacgctgtatctgcaaatgaacagcctgaagcctgaggacacggccgtatattactgttatgcagtgtacttgaccatctacacctactggggccaagggacccaggtcaccgtctcctcaggtggaggcggttcaggcggaggtggctctggcggtggcggatcggaggtgcagctgttggagtctgggggaggcttggtacagcctggggggtccctgagactctcctgtgcagcctctggaatagaggtcagcagcagtgtagtgggttggtttcgccaggctccagggaaggagcgggagtttgtctcagctagcggtgtgggaggtagcacatactacgcagactccgtgaagggccggttcaccatctccagagacaattccaagaacacgctgtatctgcaaatgaacagcctgaagcctgaggacacggccgtatattactgttatgcagtgtacttgaccatctacacctactggggccaagggacccaggtcaccgtctcctcagcggccgcaaccacgacgccagcgccgcggccaccaacaccggcgcccaccatcgcgtcgcagcccctgtccctgcgcccagaggcgtgccggccagcggcggggggcgcagtgcacacgagggggctggacttcgcctgtgatatctacatctgggcgcccttggccgggacttgtggggtccttctcctgtcactggttatcaccctttactgcaaacggggcagaaagaaactcctgtatatattcaaacaaccatttatgagaccagtacaaactactcaagaggaagatggctgtagctgccgatttccagaagaagaagaaggaggatgtgaactgagagtgaagttcagcaggagcgcagacgcccccgcgtaccagcagggccagaaccagctctataacgagctcaatctaggacgaagagaggagtacgatgttttggacaagagacgtggccgggaccctgagatggggggaaagccgagaaggaagaaccctcaggaaggcctgtacaatgaactgcagaaagataagatggcggaggcctacagtgagattgggatgaaaggcgagcgccggaggggcaaggggcacgatggcctttaccagggtctcagtacagccaccaaggacacctacgacgcccttcacatgcaggccctgccccctcgc

SEQ ID NO: 3711 - DNA, 1488 bp, synthetic construct
  misc_feature 1..1488: note = Synthetic
  source 1..1488: mol_type = other DNA
atggccttaccagtgaccgccttgctcctgccgctggccttgctgctccacgccgccaggccggaggtgcagctgttggagtctgggggaggcttggtacagcctggggggtccctgagactctcctgtgcagcctctggattcaccatcagcagatatgccatggcatggtttcgccaggctccagggaaggaacgcgagttcgtcagtgggagcattttcgttggtggtggcacatactatagggactccgtgaagggccggttcaccatctccagagataattccaagaacacgctgtatctgcaaatgaacagcctgaaacctgaggacacggccgtatattactgttatgccaccgtgggtgactcctattattactggggccaagggacccaggtcaccgtctcctcaggtggaggcggttcaggcggaggtggctctggcggtggcggatcggaggtgcagctgttggagtctgggggaggcttggtacagcctggggggtccctgagactctcctgtgcagcctctggattcaccatcagcagatatgccatggcatggtttcgccaggctccagggaaggaacgcgagttcgtcagtgggagcattttcgttggtggtggcacatactatagggactccgtgaagggccggttcaccatctccagagataattccaagaacacgctgtatctgcaaatgaacagcctgaaacctgaggacacggccgtatattactgttatgccaccgtgggtgactcctattattactggggccaagggacccaggtcaccgtctcctcagcggccgcaaccacgacgccagcgccgcggccaccaacaccggcgcccaccatcgcgtcgcagcccctgtccctgcgcccagaggcgtgccggccagcggcggggggcgcagtgcacacgagggggctggacttcgcctgtgatatctacatctgggcgcccttggccgggacttgtggggtccttctcctgtcactggttatcaccctttactgcaaacggggcagaaagaaactcctgtatatattcaaacaaccatttatgagaccagtacaaactactcaagaggaagatggctgtagctgccgatttccagaagaagaagaaggaggatgtgaactgagagtgaagttcagcaggagcgcagacgcccccgcgtaccagcagggccagaaccagctctataacgagctcaatctaggacgaagagaggagtacgatgttttggacaagagacgtggccgggaccctgagatggggggaaagccgagaaggaagaaccctcaggaaggcctgtacaatgaactgcagaaagataagatggcggaggcctacagtgagattgggatgaaaggcgagcgccggaggggcaaggggcacgatggcctttaccagggtctcagtacagccaccaaggacacctacgacgcccttcacatgcaggccctgccccctcgc

SEQ ID NO: 3712 - DNA, 1482 bp, synthetic construct
  misc_feature 1..1482: note = Synthetic
  source 1..1482: mol_type = other DNA
atggccttaccagtgaccgccttgctcctgccgctggccttgctgctccacgccgccaggccggaggtgcagctgttggagtctgggggaggcttggtacagcctggggggtccctgagactctcctgtgcagcctctggaagcctgtttagcgttgagcacatcggctggttccgccaggctccagggaaggagagagagtttgtctcagctcaggtaaccggtgggggttatacatactacgcagactccgtgaagggccggttcaccatctccagagacaattccaagaacacgctgtatctgcaaatgaacagcctgaaaccagaggacacggccgtatattactgttatgttagacttgtggaggaagcttactggggccaagggacccaggtcaccgtctcctcaggtggaggcggttcaggcggaggtggctctggcggtggcggatcggaggtgcagctgttggagtctgggggaggcttggtacagcctggggggtccctgagactctcctgtgcagcctctggaagcctgtttagcgttgagcacatcggctggttccgccaggctccagggaaggagagagagtttgtctcagctcaggtaaccggtgggggttatacatactacgcagactccgtgaagggccggttcaccatctccagagacaattccaagaacacgctgtatctgcaaatgaacagcctgaaaccagaggacacggccgtatattactgttatgttagacttgtggaggaagcttactggggccaagggacccaggtcaccgtctcctcagcggccgcaaccacgacgccagcgccgcggccaccaacaccggcgcccaccatcgcgtcgcagcccctgtccctgcgcccagaggcgtgccggccagcggcggggggcgcagtgcacacgagggggctggacttcgcctgtgatatctacatctgggcgcccttggccgggacttgtggggtccttctcctgtcactggttatcaccctttactgcaaacggggcagaaagaaactcctgtatatattcaaacaaccatttatgagaccagtacaaactactcaagaggaagatggctgtagctgccgatttccagaagaagaagaaggaggatgtgaactgagagtgaagttcagcaggagcgcagacgcccccgcgtaccagcagggccagaaccagctctataacgagctcaatctaggacgaagagaggagtacgatgttttggacaagagacgtggccgggaccctgagatggggggaaagccgagaaggaagaaccctcaggaaggcctgtacaatgaactgcagaaagataagatggcggaggcctacagtgagattgggatgaaaggcgagcgccggaggggcaaggggcacgatggcctttaccagggtctcagtacagccaccaaggacacctacgacgcccttcacatgcaggccctgccccctcgc

SEQ ID NO: 3713 - DNA, 1488 bp, synthetic construct
  misc_feature 1..1488: note = Synthetic
  source 1..1488: mol_type = other DNA
atggccttaccagtgaccgccttgctcctgccgctggccttgctgctccacgccgccaggccggaggtgcagctgttggagtctgggggaggcttggtacagcctggggggtccctgagactctcctgtgcagcctctggattcatctttagcatttatgatatgggttggttccgccaggctccagggaaggaaagggagttcgtctcagctattagtactaccggtggaagcatttactacgcagactccgtgaagggccggttcaccatctccagagacaattccaagaacacgctgtatctgcaaatgaacagcctgaagccagaggacacggccgtatattactgtaacgccgaccctttagaaagctacgggtactggggccaagggacccaggtcaccgtctcctcaggtggaggcggttcaggcggaggtggctctggcggtggcggatcggaggtgcagctgttggagtctgggggaggcttggtacagcctggggggtccctgagactctcctgtgcagcctctggattcatctttagcatttatgatatgggttggttccgccaggctccagggaaggaaagggagttcgtctcagctattagtactaccggtggaagcatttactacgcagactccgtgaagggccggttcaccatctccagagacaattccaagaacacgctgtatctgcaaatgaacagcctgaagccagaggacacggccgtatattactgtaacgccgaccctttagaaagctacgggtactggggccaagggacccaggtcaccgtctcctcagcggccgcaaccacgacgccagcgccgcggccaccaacaccggcgcccaccatcgcgtcgcagcccctgtccctgcgcccagaggcgtgccggccagcggcggggggcgcagtgcacacgagggggctggacttcgcctgtgatatctacatctgggcgcccttggccgggacttgtggggtccttctcctgtcactggttatcaccctttactgcaaacggggcagaaagaaactcctgtatatattcaaacaaccatttatgagaccagtacaaactactcaagaggaagatggctgtagctgccgatttccagaagaagaagaaggaggatgtgaactgagagtgaagttcagcaggagcgcagacgcccccgcgtaccagcagggccagaaccagctctataacgagctcaatctaggacgaagagaggagtacgatgttttggacaagagacgtggccgggaccctgagatggggggaaagccgagaaggaagaaccctcaggaaggcctgtacaatgaactgcagaaagataagatggcggaggcctacagtgagattgggatgaaaggcgagcgccggaggggcaaggggcacgatggcctttaccagggtctcagtacagccaccaaggacacctacgacgcccttcacatgcaggccctgccccctcgc

SEQ ID NO: 3714 - DNA, 1500 bp, synthetic construct
  misc_feature 1..1500: note = Synthetic
  source 1..1500: mol_type = other DNA
atggccttaccagtgaccgccttgctcctgccgctggccttgctgctccacgccgccaggccggaggtgcagctgttggagtctgggggaggcttggtacagcctggggggtccctgagactctcctgtgcagcctctggatccgtatttagcagctatttcattggctggttccgccaggctccagggaaggagagagagttcgtctcagcagtgattagtagcagtggtagcacatactacgcagactccgtgaagggccggttcaccatctccagagacaattccaagaacacgctgtatctgcaaatgaacagcctgaagcctgaggacacggccgtatattactgtgttgcacgggaggatgttggcgagccctacggctactggggccaagggacccaggtcaccgtctcctcaggtggaggcggttcaggcggaggtggctctggcggtggcggatcggaggtgcagctgttggagtctgggggaggcttggtacagcctggggggtccctgagactctcctgtgcagcctctggatccgtatttagcagctatttcattggctggttccgccaggctccagggaaggagagagagttcgtctcagcagtgattagtagcagtggtagcacatactacgcagactccgtgaagggccggttcaccatctccagagacaattccaagaacacgctgtatctgcaaatgaacagcctgaagcctgaggacacggccgtatattactgtgttgcacgggaggatgttggcgagccctacggctactggggccaagggacccaggtcaccgtctcctcagcggccgcaaccacgacgccagcgccgcggccaccaacaccggcgcccaccatcgcgtcgcagcccctgtccctgcgcccagaggcgtgccggccagcggcggggggcgcagtgcacacgagggggctggacttcgcctgtgatatctacatctgggcgcccttggccgggacttgtggggtccttctcctgtcactggttatcaccctttactgcaaacggggcagaaagaaactcctgtatatattcaaacaaccatttatgagaccagtacaaactactcaagaggaagatggctgtagctgccgatttccagaagaagaagaaggaggatgtgaactgagagtgaagttcagcaggagcgcagacgcccccgcgtaccagcagggccagaaccagctctataacgagctcaatctaggacgaagagaggagtacgatgttttggacaagagacgtggccgggaccctgagatggggggaaagccgagaaggaagaaccctcaggaaggcctgtacaatgaactgcagaaagataagatggcggaggcctacagtgagattgggatgaaaggcgagcgccggaggggcaaggggcacgatggcctttaccagggtctcagtacagccaccaaggacacctacgacgcccttcacatgcaggccctgccccctcgc

SEQ ID NO: 3715 - DNA, 1506 bp, synthetic construct
  misc_feature 1..1506: note = Synthetic
  source 1..1506: mol_type = other DNA
atggccttaccagtgaccgccttgctcctgccgctggccttgctgctccacgccgccaggccggaggtgcagctgctggaaagcggcggcggactggtgcaacctggaggatctctgagactgagctgcgctgcttctggccggggctttaccagctactacatgggctggttcagacaggcccctggcaaggaacgggaattcgtgtccgccgtgatcttcccagagggctaccggtactacgccgacagcgtgaaaggcagattcaccatcagcagagataatagcaagaacaccctgtacctgcagatgaacagcctcaagcccgaggacacagccgtctactattgtgccaagtacacaggcttcggcgaggacgcctacagatactggggccagggcacccaggtgaccgtgtccagcggtggcggtggctcgggcggtggtgggtcgggtggcggcggatctgaggtgcagctgctggagagcggaggtggtctggtgcagccggggggctccttgcgcctgtcatgcgctgcttccgggcgaggttttaccagctactacatgggctggttccgccaggcccccggcaaggagcgcgagttcgtcagcgcagtgatttttcccgagggctacaggtattacgcggacagtgtgaaaggccgcttcaccatctcgcgggacaactccaagaacacgctttacctgcagatgaattccctcaagcctgaagatacagccgtgtactactgtgccaagtacaccggcttcggagaggacgcgtaccgttattggggccaaggcacccaggtcactgtttcttctgcggccgcaaccacgacgccagcgccgcggccaccaacaccggcgcccaccatcgcgtcgcagcccctgtccctgcgcccagaggcgtgccggccagcggcggggggcgcagtgcacacgagggggctggacttcgcctgtgatatctacatctgggcgcccttggccgggacttgtggggtccttctcctgtcactggttatcaccctttactgcaaacggggcagaaagaaactcctgtatatattcaaacaaccatttatgagaccagtacaaactactcaagaggaagatggctgtagctgccgatttccagaagaagaagaaggaggatgtgaactgagagtgaagttcagcaggagcgcagacgcccccgcgtaccagcagggccagaaccagctctataacgagctcaatctaggacgaagagaggagtacgatgttttggacaagagacgtggccgggaccctgagatggggggaaagccgagaaggaagaaccctcaggaaggcctgtacaatgaactgcagaaagataagatggcggaggcctacagtgagattgggatgaaaggcgagcgccggaggggcaaggggcacgatggcctttaccagggtctcagtacagccaccaaggacacctacgacgcccttcacatgcaggccctgccccctcgc

SEQ ID NO: 3716 - DNA, 1500 bp, synthetic construct
  misc_feature 1..1500: note = Synthetic
  source 1..1500: mol_type = other DNA
atggccttaccagtgaccgccttgctcctgccgctggccttgctgctccacgccgccaggccggaggtgcagctgctggaatctggcggaggcctggtgcaacctggaggatctctgagactgagctgtgccgcttctggcctcacattcagcatccacacagttggctggtttagacaggcccctggcaaagagcgggaattcgtgtccgccgccctgggcagcggcggacgcccatactatagagatagcgtgaagggcagattcaccatcagccgggacaatagcaagaacaccctgtacctgcagatgaacagcctgaagcccgaggacaccgccgtgtactactgctacgtggacgtgggcaccggcctgtactacggctactggggccagggcacacaggtgaccgtctccagcggtggcggtggctcgggcggtggtgggtcgggtggcggcggatctgaggtgcagctgctggagagcggaggcggtctcgtgcagccgggagggagtctacgcctgtcgtgtgccgcaagcggtctcacgttttcaattcacaccgtgggctggttccgccaggccccaggcaaggagcgcgagttcgtcagcgcggctttgggctccggtgggcgtccctattacagggattctgtgaagggccgcttcaccatctctcgggacaactccaaaaacactctgtacctgcagatgaattccctgaagcctgaagacaccgccgtgtactactgctacgtggacgtagggactggcctttactacggctattggggccaaggcacccaggtcacagtttcgtccgcggccgcaaccacgacgccagcgccgcggccaccaacaccggcgcccaccatcgcgtcgcagcccctgtccctgcgcccagaggcgtgccggccagcggcggggggcgcagtgcacacgagggggctggacttcgcctgtgatatctacatctgggcgcccttggccgggacttgtggggtccttctcctgtcactggttatcaccctttactgcaaacggggcagaaagaaactcctgtatatattcaaacaaccatttatgagaccagtacaaactactcaagaggaagatggctgtagctgccgatttccagaagaagaagaaggaggatgtgaactgagagtgaagttcagcaggagcgcagacgcccccgcgtaccagcagggccagaaccagctctataacgagctcaatctaggacgaagagaggagtacgatgttttggacaagagacgtggccgggaccctgagatggggggaaagccgagaaggaagaaccctcaggaaggcctgtacaatgaactgcagaaagataagatggcggaggcctacagtgagattgggatgaaaggcgagcgccggaggggcaaggggcacgatggcctttaccagggtctcagtacagccaccaaggacacctacgacgcccttcacatgcaggccctgccccctcgc

SEQ ID NO: 3717 - DNA, 1518 bp, synthetic construct
  misc_feature 1..1518: note = Synthetic
  source 1..1518: mol_type = other DNA
atggccttaccagtgaccgccttgctcctgccgctggccttgctgctccacgccgccaggccggaggtgcagctgctggaaagcggcggaggcctggtccaacctggaggaagcctgagactgtcttgtgccgccagcggcagaatcttcagctcttattttatgggctggttccggcaggcccctggcaaggaaagagagttcgtgtccgcccacatcagcagcgagggctctacatactaccgggacagcgtgaaaggcaggttcaccatctccagagataatagcaagaacaccctgtacctgcagatgaacagcctcaagcccgaggacaccgccgtgtactactgcgctgctagagaatacgccgacacccagcggggcgagtacgcctactggggccagggcacacaggtgaccgtgtccagcggtggcggtggctcgggcggtggtgggtcgggtggcggcggatctgaggtgcagctgctggagagcggcggaggtttggtgcagccggggggttctcttcgcctgagttgcgccgctagcggacgcattttttcaagctatttcatgggctggttccgccaggcccccggcaaggagcgagagttcgtcagcgcgcacatctcttccgagggctccacctactacagggattctgtgaagggccgcttcaccatctcgcgggacaactccaagaacacgctgtacctgcagatgaattccctcaaacctgaagacactgccgtgtactactgtgccgctcgcgagtacgcggacacccaacgtggggagtacgcatattggggccagggcacccaggtcacagtttcgtccgcggccgcaaccacgacgccagcgccgcggccaccaacaccggcgcccaccatcgcgtcgcagcccctgtccctgcgcccagaggcgtgccggccagcggcggggggcgcagtgcacacgagggggctggacttcgcctgtgatatctacatctgggcgcccttggccgggacttgtggggtccttctcctgtcactggttatcaccctttactgcaaacggggcagaaagaaactcctgtatatattcaaacaaccatttatgagaccagtacaaactactcaagaggaagatggctgtagctgccgatttccagaagaagaagaaggaggatgtgaactgagagtgaagttcagcaggagcgcagacgcccccgcgtaccagcagggccagaaccagctctataacgagctcaatctaggacgaagagaggagtacgatgttttggacaagagacgtggccgggaccctgagatggggggaaagccgagaaggaagaaccctcaggaaggcctgtacaatgaactgcagaaagataagatggcggaggcctacagtgagattgggatgaaaggcgagcgccggaggggcaaggggcacgatggcctttaccagggtctcagtacagccaccaaggacacctacgacgcccttcacatgcaggccctgccccctcgc

SEQ ID NO: 3718 - DNA, 1488 bp, synthetic construct
  misc_feature 1..1488: note = Synthetic
  source 1..1488: mol_type = other DNA
atggccttaccagtgaccgccttgctcctgccgctggccttgctgctccacgccgccaggccggaggtgcagctgctggaaagcggaggcggcctggttcaacctggaggatctctgagactgagctgcgccgctagcggctctatcgtgtccagctacgccatgggctggtttagacaggcccctggcaaagagcgggaattcgtgtcctccgccatcggcaagggcggcgtcacaatctacgccgacagcgtgaagggcagattcaccatcagcagagataatagcaagaacaccctgtacctccagatgaacagcctgaagcccgaggacaccgccgtgtactattgtgctacagatgagagcacctaccgggactactggggccagggcacacaggtgaccgtgtctagcggtggcggtggctcgggcggtggtgggtcgggtggcggcggatctgaggtgcagctgctggagagcggagggggactggtgcagccgggcggctcccttcgtttgtcatgcgcagcttccggttctatcgtgtccagctacgccatgggctggttccgccaggcccccggcaaggagcgcgagttcgtctcttccgccatcggtaaaggtggggttacaatttacgcggacagcgtgaagggccgctttaccatctctcgggacaactccaagaacacgctgtacctgcagatgaattccctcaagcctgaagacaccgccgtgtactactgtgccaccgacgagagtacttacagggattattggggccaaggcacccaggtcactgtatcgtcggcggccgcaaccacgacgccagcgccgcggccaccaacaccggcgcccaccatcgcgtcgcagcccctgtccctgcgcccagaggcgtgccggccagcggcggggggcgcagtgcacacgagggggctggacttcgcctgtgatatctacatctgggcgcccttggccgggacttgtggggtccttctcctgtcactggttatcaccctttactgcaaacggggcagaaagaaactcctgtatatattcaaacaaccatttatgagaccagtacaaactactcaagaggaagatggctgtagctgccgatttccagaagaagaagaaggaggatgtgaactgagagtgaagttcagcaggagcgcagacgcccccgcgtaccagcagggccagaaccagctctataacgagctcaatctaggacgaagagaggagtacgatgttttggacaagagacgtggccgggaccctgagatggggggaaagccgagaaggaagaaccctcaggaaggcctgtacaatgaactgcagaaagataagatggcggaggcctacagtgagattgggatgaaaggcgagcgccggaggggcaaggggcacgatggcctttaccagggtctcagtacagccaccaaggacacctacgacgcccttcacatgcaggccctgccccctcgc

SEQ ID NO: 3719 - DNA, 1482 bp, synthetic construct
  misc_feature 1..1482: note = Synthetic
  source 1..1482: mol_type = other DNA
atggccttaccagtgaccgccttgctcctgccgctggccttgctgctccacgccgccaggccggaggtgcagctgctggaaagcggcggaggcctggtgcaacctggcggcagcctgagactgagctgcgctgcttctggatctctgtttcaggtcgagcacatcggctggttcagacaggcccctggcaaggaacgggacttcgtgtccgcccaggttacaggcggaggctacacctactacgccgacagcgtgaaaggcagattcaccatcagcagagataatagcaagaacaccctgtacctgcagatgaacagcctgaagcccgaggacaccgccgtgtactattgttacgtgcggctcgtggaagaggcctactggggccagggcacacaggtgaccgtgtccagcggtggcggtggctcgggcggtggtgggtcgggtggcggcggatctgaggtgcagctgctggagagcggtggagggctggtgcagccggggggctccctccgcctgagttgtgccgcttccggttctctgtttcaggtggagcacatcggttggttccgccaggcccccggcaaggagcgtgatttcgtctcggcacaagtcactggaggcggctacacctattacgcggacagcgtgaagggccgcttcaccatctctcgggacaactccaagaacacgctttacctgcagatgaattcgctaaaacctgaagacaccgccgtatactactgctacgtgaggttggtggaggaggcttattggggccagggcacccaggttacagtctcctcagcggccgcaaccacgacgccagcgccgcggccaccaacaccggcgcccaccatcgcgtcgcagcccctgtccctgcgcccagaggcgtgccggccagcggcggggggcgcagtgcacacgagggggctggacttcgcctgtgatatctacatctgggcgcccttggccgggacttgtggggtccttctcctgtcactggttatcaccctttactgcaaacggggcagaaagaaactcctgtatatattcaaacaaccatttatgagaccagtacaaactactcaagaggaagatggctgtagctgccgatttccagaagaagaagaaggaggatgtgaactgagagtgaagttcagcaggagcgcagacgcccccgcgtaccagcagggccagaaccagctctataacgagctcaatctaggacgaagagaggagtacgatgttttggacaagagacgtggccgggaccctgagatggggggaaagccgagaaggaagaaccctcaggaaggcctgtacaatgaactgcagaaagataagatggcggaggcctacagtgagattgggatgaaaggcgagcgccggaggggcaaggggcacgatggcctttaccagggtctcagtacagccaccaaggacacctacgacgcccttcacatgcaggccctgccccctcgc

SEQ ID NO: 3720 - DNA, 1518 bp, synthetic construct
  misc_feature 1..1518: note = Synthetic
  source 1..1518: mol_type = other DNA
atggccttaccagtgaccgccttgctcctgccgctggccttgctgctccacgccgccaggccggaggtgcagctgctggaaagcggcggcggactggtgcaacctggcggatctctgcggttgtcttgtgctgccagcggaacaaccttcgcctctagctttatgggctggttccggcaggcccctggcaaggaaagagagttcgtgtccgccatcgtgttcccaggcggcagcacatactatgccgacagcgtgaagggcagattcaccatcagcagagataattcaaagaacaccctgtacctgcagatgaacagcctgaaacccgaggacaccgccgtgtactactgcgccgctagacggtacgagctggtcgacagactggaatacgcctactggggccagggcacacaggtgaccgtgtccagcggtggcggtggctcgggcggtggtgggtcgggtggcggcggatctgaggtgcagctgctggaatctggaggcgggcttgtacagccgggcggttctctccgtctatcatgcgccgcgtcggggactacatttgcttccagttttatgggctggttccgccaggcccccggcaaggagcgggagttcgtcagcgccatcgtgttccctggtggctccacctactacgcggacagcgtgaagggccgattcaccatctctagggacaactccaaaaacacgctgtacctgcagatgaatagcttgaagcccgaggacaccgccgtttattactgtgctgctcgccgctacgagctggtggatcgcctggagtacgcatattggggccaaggcacccaggtcaccgtgtcgtccgcggccgcaaccacgacgccagcgccgcggccaccaacaccggcgcccaccatcgcgtcgcagcccctgtccctgcgcccagaggcgtgccggccagcggcggggggcgcagtgcacacgagggggctggacttcgcctgtgatatctacatctgggcgcccttggccgggacttgtggggtccttctcctgtcactggttatcaccctttactgcaaacggggcagaaagaaactcctgtatatattcaaacaaccatttatgagaccagtacaaactactcaagaggaagatggctgtagctgccgatttccagaagaagaagaaggaggatgtgaactgagagtgaagttcagcaggagcgcagacgcccccgcgtaccagcagggccagaaccagctctataacgagctcaatctaggacgaagagaggagtacgatgttttggacaagagacgtggccgggaccctgagatggggggaaagccgagaaggaagaaccctcaggaaggcctgtacaatgaactgcagaaagataagatggcggaggcctacagtgagattgggatgaaaggcgagcgccggaggggcaaggggcacgatggcctttaccagggtctcagtacagccaccaaggacacctacgacgcccttcacatgcaggccctgccccctcgc

SEQ ID NO: 3721 - DNA, 1488 bp, synthetic construct
  misc_feature 1..1488: note = Synthetic
  source 1..1488: mol_type = other DNA
atggccttaccagtgaccgccttgctcctgccgctggccttgctgctccacgccgccaggccggaggtgcagctgctggaaagcggcggcggactggttcagcctggaggaagcctgagactgtcttgtgccgcctctggctctgtgttcagcagctttaccatcggctggttccggcaggcccccggcaaggagagagaattcgtgtccgccatcgtgacaagcaccggcagcacatactacgctgatagcgtcaagggcagattcacaatcagcagagacaatagcaaaaacaccctgtacctgcaaatgaactccctcaagcctgaggacaccgccgtgtactactgcaacgtgcggacccaggaggactactactattggggccagggcacccaggtgaccgtgtccagcggtggcggtggctcgggcggtggtgggtcgggtggcggcggatctgaggtgcagctgctggagagcggaggtggactggtgcagccgggggggtctttgaggctgagttgtgctgcttctggctccgtgttttcatccttcaccatcggttggttccgccaggcccccggcaaggagcgggagttcgtcagcgcaattgttacttcgaccggctccacttactacgcggacagcgtaaagggccgcttcacaatctcgcgtgacaactccaagaacacgctttacctgcagatgaattccctcaaacctgaagacaccgccgtgtactactgcaacgtgcgcacccaggaggattattactattggggccaaggcacccaggtcaccgtgagctctgcggccgcaaccacgacgccagcgccgcggccaccaacaccggcgcccaccatcgcgtcgcagcccctgtccctgcgcccagaggcgtgccggccagcggcggggggcgcagtgcacacgagggggctggacttcgcctgtgatatctacatctgggcgcccttggccgggacttgtggggtccttctcctgtcactggttatcaccctttactgcaaacggggcagaaagaaactcctgtatatattcaaacaaccatttatgagaccagtacaaactactcaagaggaagatggctgtagctgccgatttccagaagaagaagaaggaggatgtgaactgagagtgaagttcagcaggagcgcagacgcccccgcgtaccagcagggccagaaccagctctataacgagctcaatctaggacgaagagaggagtacgatgttttggacaagagacgtggccgggaccctgagatggggggaaagccgagaaggaagaaccctcaggaaggcctgtacaatgaactgcagaaagataagatggcggaggcctacagtgagattgggatgaaaggcgagcgccggaggggcaaggggcacgatggcctttaccagggtctcagtacagccaccaaggacacctacgacgcccttcacatgcaggccctgccccctcgc

SEQ ID NO: 3722 - DNA, 1518 bp, synthetic construct
  misc_feature 1..1518: note = Synthetic
  source 1..1518: mol_type = other DNA
atggccttaccagtgaccgccttgctcctgccgctggccttgctgctccacgccgccaggccggaggtgcagctgctggaaagcggaggaggcctggtccagccaggcggctccctgagactgagctgtgccgcttctggcagcatcttcggcagccactttatgggctggttccggcaggcccctggcaaagagcgggaattcgtgtccgccgctgtgaccagcggcggatctacatattacgccgacagcgtgaagggcagattcaccatcagcagagataattctaagaacaccctgtacctgcagatgaacagcctcaagcccgaggacaccgccgtgtactactgcgccgccagaacctaccagagcacctaccaacctgagtacgcctactggggccagggcacacaggtgacagtgtccagcggtggcggtggctcgggcggtggtgggtcgggtggcggcggatctgaggtgcagctgctggagagcggaggtgggctggtgcagccggggggttctttgcgcctgtcatgcgccgcatctggctccatcttcggaagtcactttatgggctggttccgccaggcccccggcaaggagagggagttcgtctccgccgccgtgacctccggtggctccacttattacgcggacagcgttaagggccgcttcaccatttctcgtgacaactccaagaacacgctttacctgcagatgaattccctcaaacctgaagatacagccgtgtactactgtgctgctcggacctaccagagcacttaccaaccagagtacgcctattggggccagggcacccaggtcaccgtgtcgtcggcggccgcaaccacgacgccagcgccgcggccaccaacaccggcgcccaccatcgcgtcgcagcccctgtccctgcgcccagaggcgtgccggccagcggcggggggcgcagtgcacacgagggggctggacttcgcctgtgatatctacatctgggcgcccttggccgggacttgtggggtccttctcctgtcactggttatcaccctttactgcaaacggggcagaaagaaactcctgtatatattcaaacaaccatttatgagaccagtacaaactactcaagaggaagatggctgtagctgccgatttccagaagaagaagaaggaggatgtgaactgagagtgaagttcagcaggagcgcagacgcccccgcgtaccagcagggccagaaccagctctataacgagctcaatctaggacgaagagaggagtacgatgttttggacaagagacgtggccgggaccctgagatggggggaaagccgagaaggaagaaccctcaggaaggcctgtacaatgaactgcagaaagataagatggcggaggcctacagtgagattgggatgaaaggcgagcgccggaggggcaaggggcacgatggcctttaccagggtctcagtacagccaccaaggacacctacgacgcccttcacatgcaggccctgccccctcgc

SEQ ID NO: 3723 - DNA, 1530 bp, synthetic construct
  misc_feature 1..1530: note = Synthetic
  source 1..1530: mol_type = other DNA
atggccttaccagtgaccgccttgctcctgccgctggccttgctgctccacgccgccaggccggaggtgcagctgctggaaagcggcggaggcctggtccaacctggcggcagcctgagactgtcttgtgctgcttccggatctatcttcagcatcctggacatcggctggttccgccaggcccctggcaaggaacgggaattcgtgtccgcctatatcagcagcggcggatctacatactacagcgacagcgtgaaaggcagattcaccattagcagagataatagcaagaacaccctgtacctgcagatgaacagcctcaagcccgaggacaccgccgtgtactactgcgtggccacaatctttggcgatagaaccgagggccaggagcggtacgccttctggggccagggcacacaggtgaccgtgtccagcggtggcggtggctcgggcggtggtgggtcgggtggcggcggatctgaggtgcagctgctggagagcggaggagggttggtgcagccgggcgggagccttcgcctgtcatgcgccgcttctggctccattttttctatcctggacatcggttggttccgccaggcccccggcaaggagagggagttcgtcagcgcctacatctcgagcggtggctcgacctattactccgactccgtgaagggccgcttcaccatttctcgggacaactccaagaacacgctgtacctacagatgaattccctcaaacctgaagacactgcagtgtactactgcgtggctaccatctttggtgatcgtactgagggccaggagcgttacgcgttctggggccaaggcacccaggtcacagtttctagtgcggccgcaaccacgacgccagcgccgcggccaccaacaccggcgcccaccatcgcgtcgcagcccctgtccctgcgcccagaggcgtgccggccagcggcggggggcgcagtgcacacgagggggctggacttcgcctgtgatatctacatctgggcgcccttggccgggacttgtggggtccttctcctgtcactggttatcaccctttactgcaaacggggcagaaagaaactcctgtatatattcaaacaaccatttatgagaccagtacaaactactcaagaggaagatggctgtagctgccgatttccagaagaagaagaaggaggatgtgaactgagagtgaagttcagcaggagcgcagacgcccccgcgtaccagcagggccagaaccagctctataacgagctcaatctaggacgaagagaggagtacgatgttttggacaagagacgtggccgggaccctgagatggggggaaagccgagaaggaagaaccctcaggaaggcctgtacaatgaactgcagaaagataagatggcggaggcctacagtgagattgggatgaaaggcgagcgccggaggggcaaggggcacgatggcctttaccagggtctcagtacagccaccaaggacacctacgacgcccttcacatgcaggccctgccccctcgc

SEQ ID NO: 3724 - DNA, 1518 bp, synthetic construct
  misc_feature 1..1518: note = Synthetic
  source 1..1518: mol_type = other DNA
atggccttaccagtgaccgccttgctcctgccgctggccttgctgctccacgccgccaggccggaggtgcagctgctggaaagcggaggcggcctggtccaaccaggcggatctctgcggctgagctgtgccgccagcggctctacaaccagcagctacttcatgggctggtttcggcaggcccctggcaaggaaagagagttcgtgtccgccatcatcacctcctccggcagcccctactacgccgacagcgtgaagggcagattcaccatcagcagagataatagcaagaacaccctgtacctccagatgaacagcctgaaacctgaggatacagccgtgtactactgcgctgctagacggtacggctctagagagacagacgactacggatattggggccagggcacccaggtgaccgtgtctagcggtggcggtggctcgggcggtggtgggtcgggtggcggcggatctgaagtgcagctgctggagagcggcggcggactggtgcagccaggaggttccttgcgcctttcatgcgctgcctctggttccacaacttcgagctactttatggggtggttcagacaggccccggggaaggagagggagttcgtcagcgcaattatcacctcctctggctccccctattacgcggactcggtgaaaggccggttcaccatctctcgcgacaactccaagaacacgctctacctgcagatgaattctctgaagcctgaggacaccgccgtgtactactgtgccgctcgtcgctacggctcccgcgagactgatgactacggttattggggccaaggcacccaggtcaccgttagcagtgcggccgcaaccacgacgccagcgccgcggccaccaacaccggcgcccaccatcgcgtcgcagcccctgtccctgcgcccagaggcgtgccggccagcggcggggggcgcagtgcacacgagggggctggacttcgcctgtgatatctacatctgggcgcccttggccgggacttgtggggtccttctcctgtcactggttatcaccctttactgcaaacggggcagaaagaaactcctgtatatattcaaacaaccatttatgagaccagtacaaactactcaagaggaagatggctgtagctgccgatttccagaagaagaagaaggaggatgtgaactgagagtgaagttcagcaggagcgcagacgcccccgcgtaccagcagggccagaaccagctctataacgagctcaatctaggacgaagagaggagtacgatgttttggacaagagacgtggccgggaccctgagatggggggaaagccgagaaggaagaaccctcaggaaggcctgtacaatgaactgcagaaagataagatggcggaggcctacagtgagattgggatgaaaggcgagcgccggaggggcaaggggcacgatggcctttaccagggtctcagtacagccaccaaggacacctacgacgcccttcacatgcaggccctgccccctcgc

SEQ ID NO: 3725 - DNA, 1524 bp, synthetic construct
  misc_feature 1..1524: note = Synthetic
  source 1..1524: mol_type = other DNA
atggccttaccagtgaccgccttgctcctgccgctggccttgctgctccacgccgccaggccggaggtgcagctgctggaaagcggcggcggcctggtgcaacctggaggctctctgcggctgagctgcgctgcttctggctccgtctttagcagctacagcatgtggttcagacaggcccctggcaaggaaagagagttcgtgtccgccattatcaccagcggcggcagcacctactacgccgatagcgtgaaaggcagattcaccatcagccgggacaatagcaagaacaccctgtacctgcagatgaacagcctcaagcccgaggacaccgccgtgtactattgtgtggccgtgtacggcatcggcacaggccagtacatcggaacatacgacatctggggacagggcacacaggtgaccgtgtctagcggtggcggtggctcgggcggtggtgggtcgggtggcggcggatctgaggtgcagctgctggagagcgggggtggtctggtgcagccgggcgggtcgttgcgtctgtcatgcgccgcttctggctccgtattttctagctactccatgtggttccgccaggcccccggcaaggagcgcgagttcgtctccgccatcatcaccagcggaggctccacttactacgcggacagtgtgaagggccgcttcaccatttctcgggacaactccaagaacacgctttacctgcagatgaattccctcaaacctgaagatactgccgtttattactgcgtggcagtgtacggcatcggtacaggacaatatattgggacctacgacatctggggccagggcacccaggtcaccgtgtcgtccgcggccgcaaccacgacgccagcgccgcggccaccaacaccggcgcccaccatcgcgtcgcagcccctgtccctgcgcccagaggcgtgccggccagcggcggggggcgcagtgcacacgagggggctggacttcgcctgtgatatctacatctgggcgcccttggccgggacttgtggggtccttctcctgtcactggttatcaccctttactgcaaacggggcagaaagaaactcctgtatatattcaaacaaccatttatgagaccagtacaaactactcaagaggaagatggctgtagctgccgatttccagaagaagaagaaggaggatgtgaactgagagtgaagttcagcaggagcgcagacgcccccgcgtaccagcagggccagaaccagctctataacgagctcaatctaggacgaagagaggagtacgatgttttggacaagagacgtggccgggaccctgagatggggggaaagccgagaaggaagaaccctcaggaaggcctgtacaatgaactgcagaaagataagatggcggaggcctacagtgagattgggatgaaaggcgagcgccggaggggcaaggggcacgatggcctttaccagggtctcagtacagccaccaaggacacctacgacgcccttcacatgcaggccctgccccctcgc

SEQ ID NO: 3726 - DNA, 1512 bp, synthetic construct
  misc_feature 1..1512: note = Synthetic
  source 1..1512: mol_type = other DNA
atggccttaccagtgaccgccttgctcctgccgctggccttgctgctccacgccgccaggccggaggtgcagctgctggaaagcggaggaggcctggtccaacctggaggatctctgcggctgagctgcgccgcttctggcagcctgctcagcatctacgacatgggctggtttagacaggcccctggcaaggaacgggaattcgtgtccgccagaatcggcaaaggcggctctacatactacgccgacagcgtgaagggcagattcaccatcagcagagataatagcaagaacaccctgtacctgcagatgaacagcctgaagcccgaggacacagccgtgtactattgtgctgtgctggtgggcgagggcgagagctacggctaccactactggggccagggcacccaggtgaccgtgtccagcggtggcggtggctcgggcggtggtgggtcgggtggcggcggatctgaggtgcaactgctggagagtgggggtggattggtgcagccgggtggctccctccgcctgtcatgcgccgcttctggctcccttctcagcatttacgacatggggtggttccgccaggcccccggcaaggagcgggagttcgtctccgcccgcatcggtaaaggaggctcgacctactacgcggactccgtgaagggcaggtttaccatctctcgtgacaactccaagaacacgctatacctgcagatgaattcgctgaagcctgaagatactgcagtttattactgtgccgtgctggtaggggagggcgagagctacggctaccactattggggccagggcacccaggtcaccgtgtcctctgcggccgcaaccacgacgccagcgccgcggccaccaacaccggcgcccaccatcgcgtcgcagcccctgtccctgcgcccagaggcgtgccggccagcggcggggggcgcagtgcacacgagggggctggacttcgcctgtgatatctacatctgggcgcccttggccgggacttgtggggtccttctcctgtcactggttatcaccctttactgcaaacggggcagaaagaaactcctgtatatattcaaacaaccatttatgagaccagtacaaactactcaagaggaagatggctgtagctgccgatttccagaagaagaagaaggaggatgtgaactgagagtgaagttcagcaggagcgcagacgcccccgcgtaccagcagggccagaaccagctctataacgagctcaatctaggacgaagagaggagtacgatgttttggacaagagacgtggccgggaccctgagatggggggaaagccgagaaggaagaaccctcaggaaggcctgtacaatgaactgcagaaagataagatggcggaggcctacagtgagattgggatgaaaggcgagcgccggaggggcaaggggcacgatggcctttaccagggtctcagtacagccaccaaggacacctacgacgcccttcacatgcaggccctgccccctcgc

SEQ ID NO: 3727 - DNA, 1524 bp, synthetic construct
  misc_feature 1..1524: note = Synthetic
  source 1..1524: mol_type = other DNA
atggccttaccagtgaccgccttgctcctgccgctggccttgctgctccacgccgccaggccggaggtgcagctgctggaaagcggcggcggactggtccaacctggaggcagcctgagactgtcttgtgccgccagcggcatcggcctctccatctactttatgggctggttccggcaggcccctggcaaggaacgggaattcgtgtccgccatcatcagcagcagcggatctacctactacgccgacagcgtgaaaggcagattcaccatctctagagataatagcaagaacaccctgtacctgcagatgaacagcctgaagcccgaggacaccgccgtgtactactgcgctgctagaaccggctacagcgagtacgagcaggaggactacggctattggggccagggcacacaggtgacagtgtccagcggtggcggtggctcgggcggtggtgggtcgggtggcggcggatctgaggtgcagctgctggagagcggaggtgggctggtgcagccgggaggttctctacggttgtcatgcgccgcgtctggcatcggtcttagcatttactttatgggctggttccgccaggcccccgggaaggagagggagttcgtctcggccatcatctcttcttccggctccacttattacgcggacagcgttaagggccgcttcaccatctcgcgtgacaactccaagaacacgctgtacctgcagatgaattccctcaaacctgaagatacagcagtgtactactgtgctgctcgcaccggctactccgagtacgagcaggaggactacggctattggggccaaggcacccaggtcaccgtgtccagtgcggccgcaaccacgacgccagcgccgcggccaccaacaccggcgcccaccatcgcgtcgcagcccctgtccctgcgcccagaggcgtgccggccagcggcggggggcgcagtgcacacgagggggctggacttcgcctgtgatatctacatctgggcgcccttggccgggacttgtggggtccttctcctgtcactggttatcaccctttactgcaaacggggcagaaagaaactcctgtatatattcaaacaaccatttatgagaccagtacaaactactcaagaggaagatggctgtagctgccgatttccagaagaagaagaaggaggatgtgaactgagagtgaagttcagcaggagcgcagacgcccccgcgtaccagcagggccagaaccagctctataacgagctcaatctaggacgaagagaggagtacgatgttttggacaagagacgtggccgggaccctgagatggggggaaagccgagaaggaagaaccctcaggaaggcctgtacaatgaactgcagaaagataagatggcggaggcctacagtgagattgggatgaaaggcgagcgccggaggggcaaggggcacgatggcctttaccagggtctcagtacagccaccaaggacacctacgacgcccttcacatgcaggccctgccccctcgc

SEQ ID NO: 3728 - DNA, 1518 bp, synthetic construct
  misc_feature 1..1518: note = Synthetic
  source 1..1518: mol_type = other DNA
atggccttaccagtgaccgccttgctcctgccgctggccttgctgctccacgccgccaggccggaggtgcagctgctggaaagcggcggaggcctggtgcaacctggaggatctctcagactgagctgcgccgcttctggcagcatcttcagcagctccttcatcggctggttcagacaggcccctggcaaagagcgggaattcgtgtccgccgtgatcgcctcttctggcagcacctactacgccgacagcgtgaagggccggtttaccatcagcagagataatagcaagaacaccctgtacctgcagatgaacagcctgaagcccgaggacaccgccgtgtactattgtgctggcagattcggccagggcggcggcacagtcgagtacggctactggggccagggaacacaggtgaccgtgtccagcggtggcggtggctcgggcggtggtgggtcgggtggcggcggatctgaggtgcaactgctggagagcggcggcgggcttgtgcagccggggggctccctccggctgtcatgcgcggcctctggctccatcttcagcagctcctttatcggttggttccgccaggcccccggcaaggagcgcgagttcgtctctgcagtaattgcttcctctggttcgacttattacgcggacagtgttaaaggccgcttcaccatcagcagggacaactccaagaacacgctgtacttgcagatgaattccctgaagcctgaagatacagccgtgtactactgtgctggccgcttcggacagggcggtggtaccgtggagtacggctactggggccaggggacccaggtgaccgtctcttcggcggccgcaaccacgacgccagcgccgcggccaccaacaccggcgcccaccatcgcgtcgcagcccctgtccctgcgcccagaggcgtgccggccagcggcggggggcgcagtgcacacgagggggctggacttcgcctgtgatatctacatctgggcgcccttggccgggacttgtggggtccttctcctgtcactggttatcaccctttactgcaaacggggcagaaagaaactcctgtatatattcaaacaaccatttatgagaccagtacaaactactcaagaggaagatggctgtagctgccgatttccagaagaagaagaaggaggatgtgaactgagagtgaagttcagcaggagcgcagacgcccccgcgtaccagcagggccagaaccagctctataacgagctcaatctaggacgaagagaggagtacgatgttttggacaagagacgtggccgggaccctgagatggggggaaagccgagaaggaagaaccctcaggaaggcctgtacaatgaactgcagaaagataagatggcggaggcctacagtgagattgggatgaaaggcgagcgccggaggggcaaggggcacgatggcctttaccagggtctcagtacagccaccaaggacacctacgacgcccttcacatgcaggccctgccccctcgc

SEQ ID NO: 3729 - DNA, 1518 bp, synthetic construct
  misc_feature 1..1518: note = Synthetic
  source 1..1518: mol_type = other DNA
atggccttaccagtgaccgccttgctcctgccgctggccttgctgctccacgccgccaggccggaagtgcagctgctggaaagcggcggaggcctggtccaacctggaggatctctcagactgagctgtgccgccagcggcagagtgttcagcttctacttcatgggctggttccggcaggcccctggcaaagagcgggaatttgtgtccggcgtgatcggcaagacaggctctacatactacaccgacagcgtgaagggcagattcaccatcagcagagataatagcaagaacaccctgtacctgcagatgaacagcctgaagcccgaggacaccgccgtgtactactgcgctgcttctgagtaccagggcaccggctacggcgagtttgcctattggggccagggaacacaggtgaccgtgtccagcggtggcggtggctcgggcggtggtgggtcgggtggcggcggatctgaggtacagctgctggagagcgggggaggactggtgcagccgggcggcagccttaggctgtcttgcgcagcttccggtcgcgtgttctccttttatttcatggggtggttccgccaggcccctggtaaggagcgcgagttcgtctccggtgttattggcaagaccggctccacttactacactgattctgtgaagggccgcttcaccatcagccgggacaactccaaaaacacgttgtacctgcagatgaattctctcaagcccgaggacaccgccgtgtactactgtgctgccagtgagtaccaggggacaggctacggcgaatttgcctattggggccagggcacccaagtcaccgtgtcgtcggcggccgcaaccacgacgccagcgccgcggccaccaacaccggcgcccaccatcgcgtcgcagcccctgtccctgcgcccagaggcgtgccggccagcggcggggggcgcagtgcacacgagggggctggacttcgcctgtgatatctacatctgggcgcccttggccgggacttgtggggtccttctcctgtcactggttatcaccctttactgcaaacggggcagaaagaaactcctgtatatattcaaacaaccatttatgagaccagtacaaactactcaagaggaagatggctgtagctgccgatttccagaagaagaagaaggaggatgtgaactgagagtgaagttcagcaggagcgcagacgcccccgcgtaccagcagggccagaaccagctctataacgagctcaatctaggacgaagagaggagtacgatgttttggacaagagacgtggccgggaccctgagatggggggaaagccgagaaggaagaaccctcaggaaggcctgtacaatgaactgcagaaagataagatggcggaggcctacagtgagattgggatgaaaggcgagcgccggaggggcaaggggcacgatggcctttaccagggtctcagtacagccaccaaggacacctacgacgcccttcacatgcaggccctgccccctcgc

SEQ ID NO: 3730 - DNA, 1482 bp, synthetic construct
  misc_feature 1..1482: note = Synthetic
  source 1..1482: mol_type = other DNA
atggccttaccagtgaccgccttgctcctgccgctggccttgctgctccacgccgccaggccggaggtgcagctgctggaaagcggaggcggcctggtgcaacctggcggatctctgagactgagctgtgctgcttctggcagcctgttcgaggttgagcacatcggctggtttagacaggcccctggaaaagagcgggaattcgtgtccgcccaggtgaccggcggcggctacacctactatgccgacagcgtgaagggcagattcaccatcagcagagataatagcaagaacaccctgtacctgcagatgaacagcctcaagcccgaggacaccgccgtgtactactgctacgtgcggctggtcgaggaagcctactggggccagggcacacaggtgacagtgtccagcggtggcggtggctcgggcggtggtgggtcgggtggcggcggatctgaggtgcagctgctggagagcggaggcggtctcgtccaacctggcggctcccttcgtttgtcatgcgccgcttccggttctctgtttgaggtggagcacatcggttggttccgccaggcccccgggaaggagcgggagttcgtctccgcccaggtcacaggcgggggctacacctattacgcggacagtgtaaaaggacgcttcaccatttctagggacaactccaagaacacgctgtacctgcagatgaattccctcaagccggaagatactgcagtgtactactgttacgtgcgcctggtggaggaggcctattggggccagggcacccaggttaccgtgagctcggcggccgcaaccacgacgccagcgccgcggccaccaacaccggcgcccaccatcgcgtcgcagcccctgtccctgcgcccagaggcgtgccggccagcggcggggggcgcagtgcacacgagggggctggacttcgcctgtgatatctacatctgggcgcccttggccgggacttgtggggtccttctcctgtcactggttatcaccctttactgcaaacggggcagaaagaaactcctgtatatattcaaacaaccatttatgagaccagtacaaactactcaagaggaagatggctgtagctgccgatttccagaagaagaagaaggaggatgtgaactgagagtgaagttcagcaggagcgcagacgcccccgcgtaccagcagggccagaaccagctctataacgagctcaatctaggacgaagagaggagtacgatgttttggacaagagacgtggccgggaccctgagatggggggaaagccgagaaggaagaaccctcaggaaggcctgtacaatgaactgcagaaagataagatggcggaggcctacagtgagattgggatgaaaggcgagcgccggaggggcaaggggcacgatggcctttaccagggtctcagtacagccaccaaggacacctacgacgcccttcacatgcaggccctgccccctcgc

SEQ ID NO: 3731 - DNA, 1530 bp, synthetic construct
  misc_feature 1..1530: note = Synthetic
  source 1..1530: mol_type = other DNA
atggccttaccagtgaccgccttgctcctgccgctggccttgctgctccacgccgccaggccggaggtgcagctgctggaaagcggcggaggactggtccagcctggcggcagcctgcggctgagctgcgccgcctctggcagaatcttcggcgagtacttcatcggatggtttcggcaggccccaggaaaagagcgcgagttcgtgtccgccattatcacaggcagcggcatcacccactacgccgacagcgtgaagggcagattcaccatctccagagacaactctaagaataccctgtacctgcagatgaacagcctcaagcctgaagatacagccgtgtactactgtgctgctagaacagactacaccaccggccaagagctgcccgaatatggctactggggccagggcacccaggtgaccgtgagcagcggtggcggtggctcgggcggtggtgggtcgggtggcggcggatctgaggtgcagctgctggagagcggtggtggtctggtgcagccgggggggagcctacggttgtcatgcgcggcaagtgggcgcatcttcggcgagtacttcatcggatggttccgccaggccccaggcaaggagagggagttcgtctcggccatcattaccggctccggcatcactcactacgcggacagcgttaagggccgcttcaccatctctcgcgacaactccaagaacacgctttacctgcagatgaattccctcaaacctgaagacaccgccgtgtactactgtgctgctcgtactgattacaccacaggacaggagctgcccgagtacggctattggggccaaggcacccaggtcaccgtgtcctctgcggccgcaaccacgacgccagcgccgcggccaccaacaccggcgcccaccatcgcgtcgcagcccctgtccctgcgcccagaggcgtgccggccagcggcggggggcgcagtgcacacgagggggctggacttcgcctgtgatatctacatctgggcgcccttggccgggacttgtggggtccttctcctgtcactggttatcaccctttactgcaaacggggcagaaagaaactcctgtatatattcaaacaaccatttatgagaccagtacaaactactcaagaggaagatggctgtagctgccgatttccagaagaagaagaaggaggatgtgaactgagagtgaagttcagcaggagcgcagacgcccccgcgtaccagcagggccagaaccagctctataacgagctcaatctaggacgaagagaggagtacgatgttttggacaagagacgtggccgggaccctgagatggggggaaagccgagaaggaagaaccctcaggaaggcctgtacaatgaactgcagaaagataagatggcggaggcctacagtgagattgggatgaaaggcgagcgccggaggggcaaggggcacgatggcctttaccagggtctcagtacagccaccaaggacacctacgacgcccttcacatgcaggccctgccccctcgc

SEQ ID NO: 3732 - DNA, 1500 bp, synthetic construct
  misc_feature 1..1500: note = Synthetic
  source 1..1500: mol_type = other DNA
atggccttaccagtgaccgccttgctcctgccgctggccttgctgctccacgccgccaggccggaggtgcagctgctggaaagcggcggcggcctcgtgcaacctggcggaagcctgagactgagctgcgccgcttctggctctatcgagagcatctacttcatcggctggttcagacaggcccctggcaaggaacgggaattcgtgtccgccgagtttatccccggaggcagcaccgtctacagcgacagcgtgaagggcagattcaccatcagcagagataacagcaagaacaccctgtacctgcagatgaacagcctgaaaccagaggacaccgccgtgtactactgtaatgccggcctggacgagggccggtactatacatactggggccagggcacacaggtgaccgtgtctagcggtggcggtggctcgggcggtggtgggtcgggtggcggcggatctgaggtgcagctgctggagagtggaggagggctggtgcagccagggggttctttgcgcctgagctgtgctgcttccggctccattgagagcatctactttatcggttggttccgccaggcccccggcaaggagagggagttcgtctcggcggagttcatcccgggcggctccactgtttacagcgattctgtgaagggccgcttcaccatctctcgggacaactccaagaacacgctatacctgcaaatgaacagccttaaacctgaagacaccgccgtgtactactgcaatgcaggtctcgacgagggccgttattacacctattggggccagggcacccaggtcacagtgtcgtccgcggccgcaaccacgacgccagcgccgcggccaccaacaccggcgcccaccatcgcgtcgcagcccctgtccctgcgcccagaggcgtgccggccagcggcggggggcgcagtgcacacgagggggctggacttcgcctgtgatatctacatctgggcgcccttggccgggacttgtggggtccttctcctgtcactggttatcaccctttactgcaaacggggcagaaagaaactcctgtatatattcaaacaaccatttatgagaccagtacaaactactcaagaggaagatggctgtagctgccgatttccagaagaagaagaaggaggatgtgaactgagagtgaagttcagcaggagcgcagacgcccccgcgtaccagcagggccagaaccagctctataacgagctcaatctaggacgaagagaggagtacgatgttttggacaagagacgtggccgggaccctgagatggggggaaagccgagaaggaagaaccctcaggaaggcctgtacaatgaactgcagaaagataagatggcggaggcctacagtgagattgggatgaaaggcgagcgccggaggggcaaggggcacgatggcctttaccagggtctcagtacagccaccaaggacacctacgacgcccttcacatgcaggccctgccccctcgc

SEQ ID NO: 3733 - DNA, 1482 bp, synthetic construct
  misc_feature 1..1482: note = Synthetic
  source 1..1482: mol_type = other DNA
atggccttaccagtgaccgccttgctcctgccgctggccttgctgctccacgccgccaggccggaggttcagctgctggaaagcggaggcggcctggtgcaacctggcggcagcctgcggctgagctgtgccgcttctggcatcgaggtgtctagcagcgtggtcggctggtttagacaggcccctggcaaggaaagagagttcgtgtccgccagcggcgtgggcggatctacatactacgctgatagcgtgaaaggcagattcaccatcagccgggacaatagcaagaacaccctgtacctgcagatgaacagcctcaagcccgaggacaccgccgtgtattactgctacgccgtgtacctgaccatctacacatactggggacagggcacacaggtgaccgtgtcctccggtggcggtggctcgggcggtggtgggtcgggtggcggcggatctgaagtgcagctgctggagagcggaggtgggctggtgcagccggggggttctcttcgtctatcatgcgccgcttctggcattgaggtgagcagttccgtggtgggttggttccggcaggcccctggcaaggagcgcgagttcgtctccgcctccggagtaggcggctccacatactacgcggacagcgttaaaggccgctttactatctctcgcgataactccaagaacactctgtacctgcagatgaattccctcaagcccgaggacaccgccgtgtactattgttacgcagtctacttgacgatctacacctattggggccaaggcacccaggtcaccgtgtcgtcggcggccgcaaccacgacgccagcgccgcggccaccaacaccggcgcccaccatcgcgtcgcagcccctgtccctgcgcccagaggcgtgccggccagcggcggggggcgcagtgcacacgagggggctggacttcgcctgtgatatctacatctgggcgcccttggccgggacttgtggggtccttctcctgtcactggttatcaccctttactgcaaacggggcagaaagaaactcctgtatatattcaaacaaccatttatgagaccagtacaaactactcaagaggaagatggctgtagctgccgatttccagaagaagaagaaggaggatgtgaactgagagtgaagttcagcaggagcgcagacgcccccgcgtaccagcagggccagaaccagctctataacgagctcaatctaggacgaagagaggagtacgatgttttggacaagagacgtggccgggaccctgagatggggggaaagccgagaaggaagaaccctcaggaaggcctgtacaatgaactgcagaaagataagatggcggaggcctacagtgagattgggatgaaaggcgagcgccggaggggcaaggggcacgatggcctttaccagggtctcagtacagccaccaaggacacctacgacgcccttcacatgcaggccctgccccctcgc

SEQ ID NO: 3734 - DNA, 1488 bp, synthetic construct
  misc_feature 1..1488: note = Synthetic
  source 1..1488: mol_type = other DNA
atggccttaccagtgaccgccttgctcctgccgctggccttgctgctccacgccgccaggccggaggtgcagctcctggaaagcggcggaggcctggtgcaacctggaggctctctgagactgtcttgtgccgctagcggatttaccatctccagatacgccatggcctggttccggcaggcccctggcaaggaaagagagttcgtgtccggcagcatcttcgtgggcggcggcacatactatagagatagcgtgaaaggccgcttcaccatcagccgggacaatagcaagaacaccctgtacctgcagatgaacagcctgaagcccgaggacaccgccgtgtactactgctacgctacagtcggcgacagctactactactggggccagggcacccaggtgacagtgtctagcggtggcggtggctcgggcggtggtgggtcgggtggcggcggatctgaggtgcagctgctggagagcggtggagggctggtgcagccgggaggctccctccgcttgtcatgcgctgcaagtggctttactatttcccgctacgccatggcttggttcaggcaagcccccggcaaggagcgggagttcgttagcggctccatcttcgtcggtggtggcacctactaccgtgattctgtgaagggccgcttcaccatctctcgcgacaactccaagaacacgctttacctgcagatgaattctctgaaacctgaagacactgccgtgtactactgttacgcgacagtaggggacagctattactattggggccagggcacccaggtcaccgtgtcgtcggcggccgcaaccacgacgccagcgccgcggccaccaacaccggcgcccaccatcgcgtcgcagcccctgtccctgcgcccagaggcgtgccggccagcggcggggggcgcagtgcacacgagggggctggacttcgcctgtgatatctacatctgggcgcccttggccgggacttgtggggtccttctcctgtcactggttatcaccctttactgcaaacggggcagaaagaaactcctgtatatattcaaacaaccatttatgagaccagtacaaactactcaagaggaagatggctgtagctgccgatttccagaagaagaagaaggaggatgtgaactgagagtgaagttcagcaggagcgcagacgcccccgcgtaccagcagggccagaaccagctctataacgagctcaatctaggacgaagagaggagtacgatgttttggacaagagacgtggccgggaccctgagatggggggaaagccgagaaggaagaaccctcaggaaggcctgtacaatgaactgcagaaagataagatggcggaggcctacagtgagattgggatgaaaggcgagcgccggaggggcaaggggcacgatggcctttaccagggtctcagtacagccaccaaggacacctacgacgcccttcacatgcaggccctgccccctcgc

SEQ ID NO: 3735 - DNA, 1482 bp, synthetic construct
  misc_feature 1..1482: note = Synthetic
  source 1..1482: mol_type = other DNA
atggccttaccagtgaccgccttgctcctgccgctggccttgctgctccacgccgccaggccggaggtgcagctgctggaaagcggcggaggcctggtgcaacctggaggcagcctgagactgagctgcgctgcttctggcagcctgttcagcgtggaacacatcggctggtttagacaggcccctggcaaagagcgggagttcgtgtccgcccaggttacaggcggcggctacacctactacgccgacagcgtgaagggcagattcaccatcagcagagataatagcaagaacaccctgtacctgcagatgaacagcctcaagcccgaggacaccgccgtgtactattgttacgtgcggctggtcgaggaagcctactggggccagggcacccaggtgacagtgtcttctggtggcggtggctcgggcggtggtgggtcgggtggcggcggatctgaggtgcagctgctggagagcggagggggattggtgcagccggggggctcccttcgtctaagttgcgccgcttccggttctctgttttcagtggagcacatcggttggttccgccaggcccccggcaaggagcgggagttcgtcagcgcacaagtcaccggcggtggctacacctattacgcggacagcgttaagggccgcttcaccatttctagggacaactccaagaacacgctgtacctgcagatgaattccctcaaacctgaagatacagccgtgtactactgttacgtgcgcctggtggaggaggcttattggggccagggcacccaggtcactgtatcgtcggcggccgcaaccacgacgccagcgccgcggccaccaacaccggcgcccaccatcgcgtcgcagcccctgtccctgcgcccagaggcgtgccggccagcggcggggggcgcagtgcacacgagggggctggacttcgcctgtgatatctacatctgggcgcccttggccgggacttgtggggtccttctcctgtcactggttatcaccctttactgcaaacggggcagaaagaaactcctgtatatattcaaacaaccatttatgagaccagtacaaactactcaagaggaagatggctgtagctgccgatttccagaagaagaagaaggaggatgtgaactgagagtgaagttcagcaggagcgcagacgcccccgcgtaccagcagggccagaaccagctctataacgagctcaatctaggacgaagagaggagtacgatgttttggacaagagacgtggccgggaccctgagatggggggaaagccgagaaggaagaaccctcaggaaggcctgtacaatgaactgcagaaagataagatggcggaggcctacagtgagattgggatgaaaggcgagcgccggaggggcaaggggcacgatggcctttaccagggtctcagtacagccaccaaggacacctacgacgcccttcacatgcaggccctgccccctcgc

SEQ ID NO: 3736 - DNA, 1488 bp, synthetic construct
  misc_feature 1..1488: note = Synthetic
  source 1..1488: mol_type = other DNA
atggccttaccagtgaccgccttgctcctgccgctggccttgctgctccacgccgccaggccggaggtgcagctgctggaaagcggaggcggcctggtccaacctggaggcagcctgagactgagctgcgccgctagcggctttatcttcagcatctacgacatgggctggttccggcaggcccctggcaaagagcgggaattcgtgtccgccatctctacaacaggcggatctatctactacgccgacagcgtgaagggcagattcaccatcagcagagataacagcaagaacaccctgtacctgcagatgaactccctcaagcccgaggacaccgccgtgtactattgtaatgctgatccactggagagctacggctactggggccagggcacccaggtgaccgtgtctagcggtggcggtggctcgggcggtggtgggtcgggtggcggcggatctgaggtgcaactgctggagagtgggggagggctggtgcagccgggaggctccctccgtctttcgtgtgctgcttccggcttcatcttttcaatttacgacatgggctggttccgccaggcccccggcaaggagcgcgagttcgtctctgccatctcgaccacaggtggttccatctattacgcggacagcgtgaagggtcgcttcaccatctctcgggacaactccaagaacacgctatacctgcagatgaacagcttgaaacctgaagatactgccgtgtactactgcaatgcagaccccctggagagctacggctattggggccagggcacccaggtcaccgtttcttccgcggccgcaaccacgacgccagcgccgcggccaccaacaccggcgcccaccatcgcgtcgcagcccctgtccctgcgcccagaggcgtgccggccagcggcggggggcgcagtgcacacgagggggctggacttcgcctgtgatatctacatctgggcgcccttggccgggacttgtggggtccttctcctgtcactggttatcaccctttactgcaaacggggcagaaagaaactcctgtatatattcaaacaaccatttatgagaccagtacaaactactcaagaggaagatggctgtagctgccgatttccagaagaagaagaaggaggatgtgaactgagagtgaagttcagcaggagcgcagacgcccccgcgtaccagcagggccagaaccagctctataacgagctcaatctaggacgaagagaggagtacgatgttttggacaagagacgtggccgggaccctgagatggggggaaagccgagaaggaagaaccctcaggaaggcctgtacaatgaactgcagaaagataagatggcggaggcctacagtgagattgggatgaaaggcgagcgccggaggggcaaggggcacgatggcctttaccagggtctcagtacagccaccaaggacacctacgacgcccttcacatgcaggccctgccccctcgc

SEQ ID NO: 3737 - DNA, 1500 bp, synthetic construct
  misc_feature 1..1500: note = Synthetic
  source 1..1500: mol_type = other DNA
atggccttaccagtgaccgccttgctcctgccgctggccttgctgctccacgccgccaggccggaggtgcagctgctggaatctggcggcggactggtgcaacctggcggcagcctgagactgagctgcgccgcttctggctctgtgttcagctcctactttatcggctggttccggcaggcccctggaaaggaaagagagttcgtgtccgccgtgatctccagcagcggaagcacctactacgccgacagcgtgaaaggcagattcaccatcagccgggacaatagcaagaacaccctgtacctgcagatgaacagcctcaagcccgaggacacagctgtctactattgtgtggccagagaagatgtgggcgagccatacggctactggggccagggcacacaggtgaccgtgtctagcggtggcggtggctcgggcggtggtgggtcgggtggcggcggatctgaggtgcagctgctggagagcggcggcggtctggtgcagccgggaggctccctccgcctgtcatgcgccgcttccggatcggtgttttctagctacttcatcggttggttccgccaggcccccgggaaggagcgggagttcgtctccgccgtgatttcttcttctggctccacctactacgcggacagcgtgaagggtcgcttcaccatctcgcgtgacaactccaaaaacacgctttacctgcagatgaattccttgaagcctgaagatacagccgtgtactactgcgtggcaagggaggacgtgggggagccctatggctattggggccaaggcacccaggtcactgtatccagtgcggccgcaaccacgacgccagcgccgcggccaccaacaccggcgcccaccatcgcgtcgcagcccctgtccctgcgcccagaggcgtgccggccagcggcggggggcgcagtgcacacgagggggctggacttcgcctgtgatatctacatctgggcgcccttggccgggacttgtggggtccttctcctgtcactggttatcaccctttactgcaaacggggcagaaagaaactcctgtatatattcaaacaaccatttatgagaccagtacaaactactcaagaggaagatggctgtagctgccgatttccagaagaagaagaaggaggatgtgaactgagagtgaagttcagcaggagcgcagacgcccccgcgtaccagcagggccagaaccagctctataacgagctcaatctaggacgaagagaggagtacgatgttttggacaagagacgtggccgggaccctgagatggggggaaagccgagaaggaagaaccctcaggaaggcctgtacaatgaactgcagaaagataagatggcggaggcctacagtgagattgggatgaaaggcgagcgccggaggggcaaggggcacgatggcctttaccagggtctcagtacagccaccaaggacacctacgacgcccttcacatgcaggccctgccccctcgc

SEQ ID NO: 3738 - protein, 727 aa, synthetic construct
  REGION 1..727: note = Synthetic
MALPVTALLLPLALLLHAARPEVQLLESGGGLVQPGGSLRLSCAASGRGFTSYYMGWFRQAPGKEREFVSAVIFPEGYRYYADSVKGRFTISRDNSKNTLYLQMNSLKPEDTAVYYCAKYTGFGEDAYRYWGQGTQVTVSSGGGGSGGGGSGGGGSEVQLLESGGGLVQPGGSLRLSCAASGRGFTSYYMGWFRQAPGKEREFVSAVIFPEGYRYYADSVKGRFTISRDNSKNTLYLQMNSLKPEDTAVYYCAKYTGFGEDAYRYWGQGTQVTVSSAAATTTPAPRPPTPAPTIASQPLSLRPEACRPAAGGAVHTRGLDFACDIYIWAPLAGTCGVLLLSLVITLYCKRGRKKLLYIFKQPFMRPVQTTQEEDGCSCRFPEEEEGGCELRVKFSRSADAPAYQQGQNQLYNELNLGRREEYDVLDKRRGRDPEMGGKPRRKNPQEGLYNELQKDKMAEAYSEIGMKGERRRGKGHDGLYQGLSTATKDTYDALHMQALPPRGSGEGRGSLLTCGDVEENPGPMALPVTALLLPLALLLHAARPNWVNVISDLKKIEDLIQSMHIDATLYTESDVHPSCKVTAMKCFLLELQVISLESGDASIHDTVENLIILANNSLSSNGNVTESGCKECEELEEKNIKEFLQSFVHIVQMFINTSTTTPAPRPPTPAPTIASQPLSLRPEACRPAAGGAVHTRGLDFACDIYIWAPLAGTCGVLLLSLVITLYC

SEQ ID NO: 3739 - protein, 725 aa, synthetic construct
  REGION 1..725: note = Synthetic
MALPVTALLLPLALLLHAARPEVQLLESGGGLVQPGGSLRLSCAASGLTFSIHTVGWFRQAPGKEREFVSAALGSGGRPYYRDSVKGRFTISRDNSKNTLYLQMNSLKPEDTAVYYCYVDVGTGLYYGYWGQGTQVTVSSGGGGSGGGGSGGGGSEVQLLESGGGLVQPGGSLRLSCAASGLTFSIHTVGWFRQAPGKEREFVSAALGSGGRPYYRDSVKGRFTISRDNSKNTLYLQMNSLKPEDTAVYYCYVDVGTGLYYGYWGQGTQVTVSSAAATTTPAPRPPTPAPTIASQPLSLRPEACRPAAGGAVHTRGLDFACDIYIWAPLAGTCGVLLLSLVITLYCKRGRKKLLYIFKQPFMRPVQTTQEEDGCSCRFPEEEEGGCELRVKFSRSADAPAYQQGQNQLYNELNLGRREEYDVLDKRRGRDPEMGGKPRRKNPQEGLYNELQKDKMAEAYSEIGMKGERRRGKGHDGLYQGLSTATKDTYDALHMQALPPRGSGEGRGSLLTCGDVEENPGPMALPVTALLLPLALLLHAARPNWVNVISDLKKIEDLIQSMHIDATLYTESDVHPSCKVTAMKCFLLELQVISLESGDASIHDTVENLIILANNSLSSNGNVTESGCKECEELEEKNIKEFLQSFVHIVQMFINTSTTTPAPRPPTPAPTIASQPLSLRPEACRPAAGGAVHTRGLDFACDIYIWAPLAGTCGVLLLSLVITLYC

SEQ ID NO: 3740 - protein, 731 aa, synthetic construct
  REGION 1..731: note = Synthetic
MALPVTALLLPLALLLHAARPEVQLLESGGGLVQPGGSLRLSCAASGRIFSSYFMGWFRQAPGKEREFVSAHISSEGSTYYRDSVKGRFTISRDNSKNTLYLQMNSLKPEDTAVYYCAAREYADTQRGEYAYWGQGTQVTVSSGGGGSGGGGSGGGGSEVQLLESGGGLVQPGGSLRLSCAASGRIFSSYFMGWFRQAPGKEREFVSAHISSEGSTYYRDSVKGRFTISRDNSKNTLYLQMNSLKPEDTAVYYCAAREYADTQRGEYAYWGQGTQVTVSSAAATTTPAPRPPTPAPTIASQPLSLRPEACRPAAGGAVHTRGLDFACDIYIWAPLAGTCGVLLLSLVITLYCKRGRKKLLYIFKQPFMRPVQTTQEEDGCSCRFPEEEEGGCELRVKFSRSADAPAYQQGQNQLYNELNLGRREEYDVLDKRRGRDPEMGGKPRRKNPQEGLYNELQKDKMAEAYSEIGMKGERRRGKGHDGLYQGLSTATKDTYDALHMQALPPRGSGEGRGSLLTCGDVEENPGPMALPVTALLLPLALLLHAARPNWVNVISDLKKIEDLIQSMHIDATLYTESDVHPSCKVTAMKCFLLELQVISLESGDASIHDTVENLIILANNSLSSNGNVTESGCKECEELEEKNIKEFLQSFVHIVQMFINTSTTTPAPRPPTPAPTIASQPLSLRPEACRPAAGGAVHTRGLDFACDIYIWAPLAGTCGVLLLSLVITLYC

SEQ ID NO: 3741 - protein, 721 aa, synthetic construct
  REGION 1..721: note = Synthetic
MALPVTALLLPLALLLHAARPEVQLLESGGGLVQPGGSLRLSCAASGSIVSSYAMGWFRQAPGKEREFVSSAIGKGGVTIYADSVKGRFTISRDNSKNTLYLQMNSLKPEDTAVYYCATDESTYRDYWGQGTQVTVSSGGGGSGGGGSGGGGSEVQLLESGGGLVQPGGSLRLSCAASGSIVSSYAMGWFRQAPGKEREFVSSAIGKGGVTIYADSVKGRFTISRDNSKNTLYLQMNSLKPEDTAVYYCATDESTYRDYWGQGTQVTVSSAAATTTPAPRPPTPAPTIASQPLSLRPEACRPAAGGAVHTRGLDFACDIYIWAPLAGTCGVLLLSLVITLYCKRGRKKLLYIFKQPFMRPVQTTQEEDGCSCRFPEEEEGGCELRVKFSRSADAPAYQQGQNQLYNELNLGRREEYDVLDKRRGRDPEMGGKPRRKNPQEGLYNELQKDKMAEAYSEIGMKGERRRGKGHDGLYQGLSTATKDTYDALHMQALPPRGSGEGRGSLLTCGDVEENPGPMALPVTALLLPLALLLHAARPNWVNVISDLKKIEDLIQSMHIDATLYTESDVHPSCKVTAMKCFLLELQVISLESGDASIHDTVENLIILANNSLSSNGNVTESGCKECEELEEKNIKEFLQSFVHIVQMFINTSTTTPAPRPPTPAPTIASQPLSLRPEACRPAAGGAVHTRGLDFACDIYIWAPLAGTCGVLLLSLVITLYC

SEQ ID NO: 3742 - protein, 719 aa, synthetic construct
  REGION 1..719: note = Synthetic
MALPVTALLLPLALLLHAARPEVQLLESGGGLVQPGGSLRLSCAASGSLFQVEHIGWFRQAPGKERDFVSAQVTGGGYTYYADSVKGRFTISRDNSKNTLYLQMNSLKPEDTAVYYCYVRLVEEAYWGQGTQVTVSSGGGGSGGGGSGGGGSEVQLLESGGGLVQPGGSLRLSCAASGSLFQVEHIGWFRQAPGKERDFVSAQVTGGGYTYYADSVKGRFTISRDNSKNTLYLQMNSLKPEDTAVYYCYVRLVEEAYWGQGTQVTVSSAAATTTPAPRPPTPAPTIASQPLSLRPEACRPAAGGAVHTRGLDFACDIYIWAPLAGTCGVLLLSLVITLYCKRGRKKLLYIFKQPFMRPVQTTQEEDGCSCRFPEEEEGGCELRVKFSRSADAPAYQQGQNQLYNELNLGRREEYDVLDKRRGRDPEMGGKPRRKNPQEGLYNELQKDKMAEAYSEIGMKGERRRGKGHDGLYQGLSTATKDTYDALHMQALPPRGSGEGRGSLLTCGDVEENPGPMALPVTALLLPLALLLHAARPNWVNVISDLKKIEDLIQSMHIDATLYTESDVHPSCKVTAMKCFLLELQVISLESGDASIHDTVENLIILANNSLSSNGNVTESGCKECEELEEKNIKEFLQSFVHIVQMFINTSTTTPAPRPPTPAPTIASQPLSLRPEACRPAAGGAVHTRGLDFACDIYIWAPLAGTCGVLLLSLVITLYC

SEQ ID NO: 3743 - protein, 731 aa, synthetic construct
  REGION 1..731: note = Synthetic
MALPVTALLLPLALLLHAARPEVQLLESGGGLVQPGGSLRLSCAASGTTFASSFMGWFRQAPGKEREFVSAIVFPGGSTYYADSVKGRFTISRDNSKNTLYLQMNSLKPEDTAVYYCAARRYELVDRLEYAYWGQGTQVTVSSGGGGSGGGGSGGGGSEVQLLESGGGLVQPGGSLRLSCAASGTTFASSFMGWFRQAPGKEREFVSAIVFPGGSTYYADSVKGRFTISRDNSKNTLYLQMNSLKPEDTAVYYCAARRYELVDRLEYAYWGQGTQVTVSSAAATTTPAPRPPTPAPTIASQPLSLRPEACRPAAGGAVHTRGLDFACDIYIWAPLAGTCGVLLLSLVITLYCKRGRKKLLYIFKQPFMRPVQTTQEEDGCSCRFPEEEEGGCELRVKFSRSADAPAYQQGQNQLYNELNLGRREEYDVLDKRRGRDPEMGGKPRRKNPQEGLYNELQKDKMAEAYSEIGMKGERRRGKGHDGLYQGLSTATKDTYDALHMQALPPRGSGEGRGSLLTCGDVEENPGPMALPVTALLLPLALLLHAARPNWVNVISDLKKIEDLIQSMHIDATLYTESDVHPSCKVTAMKCFLLELQVISLESGDASIHDTVENLIILANNSLSSNGNVTESGCKECEELEEKNIKEFLQSFVHIVQMFINTSTTTPAPRPPTPAPTIASQPLSLRPEACRPAAGGAVHTRGLDFACDIYIWAPLAGTCGVLLLSLVITLYC

SEQ ID NO: 3744 - protein, 721 aa, synthetic construct
  REGION 1..721: note = Synthetic
MALPVTALLLPLALLLHAARPEVQLLESGGGLVQPGGSLRLSCAASGSVFSSFTIGWFRQAPGKEREFVSAIVTSTGSTYYADSVKGRFTISRDNSKNTLYLQMNSLKPEDTAVYYCNVRTQEDYYYWGQGTQVTVSSGGGGSGGGGSGGGGSEVQLLESGGGLVQPGGSLRLSCAASGSVFSSFTIGWFRQAPGKEREFVSAIVTSTGSTYYADSVKGRFTISRDNSKNTLYLQMNSLKPEDTAVYYCNVRTQEDYYYWGQGTQVTVSSAAATTTPAPRPPTPAPTIASQPLSLRPEACRPAAGGAVHTRGLDFACDIYIWAPLAGTCGVLLLSLVITLYCKRGRKKLLYIFKQPFMRPVQTTQEEDGCSCRFPEEEEGGCELRVKFSRSADAPAYQQGQNQLYNELNLGRREEYDVLDKRRGRDPEMGGKPRRKNPQEGLYNELQKDKMAEAYSEIGMKGERRRGKGHDGLYQGLSTATKDTYDALHMQALPPRGSGEGRGSLLTCGDVEENPGPMALPVTALLLPLALLLHAARPNWVNVISDLKKIEDLIQSMHIDATLYTESDVHPSCKVTAMKCFLLELQVISLESGDASIHDTVENLIILANNSLSSNGNVTESGCKECEELEEKNIKEFLQSFVHIVQMFINTSTTTPAPRPPTPAPTIASQPLSLRPEACRPAAGGAVHTRGLDFACDIYIWAPLAGTCGVLLLSLVITLYC

SEQ ID NO: 3745 - protein, 731 aa, synthetic construct
  REGION 1..731: note = Synthetic
MALPVTALLLPLALLLHAARPEVQLLESGGGLVQPGGSLRLSCAASGSIFGSHFMGWFRQAPGKEREFVSAAVTSGGSTYYADSVKGRFTISRDNSKNTLYLQMNSLKPEDTAVYYCAARTYQSTYQPEYAYWGQGTQVTVSSGGGGSGGGGSGGGGSEVQLLESGGGLVQPGGSLRLSCAASGSIFGSHFMGWFRQAPGKEREFVSAAVTSGGSTYYADSVKGRFTISRDNSKNTLYLQMNSLKPEDTAVYYCAARTYQSTYQPEYAYWGQGTQVTVSSAAATTTPAPRPPTPAPTIASQPLSLRPEACRPAAGGAVHTRGLDFACDIYIWAPLAGTCGVLLLSLVITLYCKRGRKKLLYIFKQPFMRPVQTTQEEDGCSCRFPEEEEGGCELRVKFSRSADAPAYQQGQNQLYNELNLGRREEYDVLDKRRGRDPEMGGKPRRKNPQEGLYNELQKDKMAEAYSEIGMKGERRRGKGHDGLYQGLSTATKDTYDALHMQALPPRGSGEGRGSLLTCGDVEENPGPMALPVTALLLPLALLLHAARPNWVNVISDLKKIEDLIQSMHIDATLYTESDVHPSCKVTAMKCFLLELQVISLESGDASIHDTVENLIILANNSLSSNGNVTESGCKECEELEEKNIKEFLQSFVHIVQMFINTSTTTPAPRPPTPAPTIASQPLSLRPEACRPAAGGAVHTRGLDFACDIYIWAPLAGTCGVLLLSLVITLYC

SEQ ID NO: 3746 - protein, 735 aa, synthetic construct
  REGION 1..735: note = Synthetic
MALPVTALLLPLALLLHAARPEVQLLESGGGLVQPGGSLRLSCAASGSIFSILDIGWFRQAPGKEREFVSAYISSGGSTYYSDSVKGRFTISRDNSKNTLYLQMNSLKPEDTAVYYCVATIFGDRTEGQERYAFWGQGTQVTVSSGGGGSGGGGSGGGGSEVQLLESGGGLVQPGGSLRLSCAASGSIFSILDIGWFRQAPGKEREFVSAYISSGGSTYYSDSVKGRFTISRDNSKNTLYLQMNSLKPEDTAVYYCVATIFGDRTEGQERYAFWGQGTQVTVSSAAATTTPAPRPPTPAPTIASQPLSLRPEACRPAAGGAVHTRGLDFACDIYIWAPLAGTCGVLLLSLVITLYCKRGRKKLLYIFKQPFMRPVQTTQEEDGCSCRFPEEEEGGCELRVKFSRSADAPAYQQGQNQLYNELNLGRREEYDVLDKRRGRDPEMGGKPRRKNPQEGLYNELQKDKMAEAYSEIGMKGERRRGKGHDGLYQGLSTATKDTYDALHMQALPPRGSGEGRGSLLTCGDVEENPGPMALPVTALLLPLALLLHAARPNWVNVISDLKKIEDLIQSMHIDATLYTESDVHPSCKVTAMKCFLLELQVISLESGDASIHDTVENLIILANNSLSSNGNVTESGCKECEELEEKNIKEFLQSFVHIVQMFINTSTTTPAPRPPTPAPTIASQPLSLRPEACRPAAGGAVHTRGLDFACDIYIWAPLAGTCGVLLLSLVITLYC

SEQ ID NO: 3747 - protein, 731 aa, synthetic construct
  REGION 1..731: note = Synthetic
MALPVTALLLPLALLLHAARPEVQLLESGGGLVQPGGSLRLSCAASGSTTSSYFMGWFRQAPGKEREFVSAIITSSGSPYYADSVKGRFTISRDNSKNTLYLQMNSLKPEDTAVYYCAARRYGSRETDDYGYWGQGTQVTVSSGGGGSGGGGSGGGGSEVQLLESGGGLVQPGGSLRLSCAASGSTTSSYFMGWFRQAPGKEREFVSAIITSSGSPYYADSVKGRFTISRDNSKNTLYLQMNSLKPEDTAVYYCAARRYGSRETDDYGYWGQGTQVTVSSAAATTTPAPRPPTPAPTIASQPLSLRPEACRPAAGGAVHTRGLDFACDIYIWAPLAGTCGVLLLSLVITLYCKRGRKKLLYIFKQPFMRPVQTTQEEDGCSCRFPEEEEGGCELRVKFSRSADAPAYQQGQNQLYNELNLGRREEYDVLDKRRGRDPEMGGKPRRKNPQEGLYNELQKDKMAEAYSEIGMKGERRRGKGHDGLYQGLSTATKDTYDALHMQALPPRGSGEGRGSLLTCGDVEENPGPMALPVTALLLPLALLLHAARPNWVNVISDLKKIEDLIQSMHIDATLYTESDVHPSCKVTAMKCFLLELQVISLESGDASIHDTVENLIILANNSLSSNGNVTESGCKECEELEEKNIKEFLQSFVHIVQMFINTSTTTPAPRPPTPAPTIASQPLSLRPEACRPAAGGAVHTRGLDFACDIYIWAPLAGTCGVLLLSLVITLYC

SEQ ID NO: 3748 - protein, 733 aa, synthetic construct
  REGION 1..733: note = Synthetic
MALPVTALLLPLALLLHAARPEVQLLESGGGLVQPGGSLRLSCAASGSVFSSYSMWFRQAPGKEREFVSAIITSGGSTYYADSVKGRFTISRDNSKNTLYLQMNSLKPEDTAVYYCVAVYGIGTGQYIGTYDIWGQGTQVTVSSGGGGSGGGGSGGGGSEVQLLESGGGLVQPGGSLRLSCAASGSVFSSYSMWFRQAPGKEREFVSAIITSGGSTYYADSVKGRFTISRDNSKNTLYLQMNSLKPEDTAVYYCVAVYGIGTGQYIGTYDIWGQGTQVTVSSAAATTTPAPRPPTPAPTIASQPLSLRPEACRPAAGGAVHTRGLDFACDIYIWAPLAGTCGVLLLSLVITLYCKRGRKKLLYIFKQPFMRPVQTTQEEDGCSCRFPEEEEGGCELRVKFSRSADAPAYQQGQNQLYNELNLGRREEYDVLDKRRGRDPEMGGKPRRKNPQEGLYNELQKDKMAEAYSEIGMKGERRRGKGHDGLYQGLSTATKDTYDALHMQALPPRGSGEGRGSLLTCGDVEENPGPMALPVTALLLPLALLLHAARPNWVNVISDLKKIEDLIQSMHIDATLYTESDVHPSCKVTAMKCFLLELQVISLESGDASIHDTVENLIILANNSLSSNGNVTESGCKECEELEEKNIKEFLQSFVHIVQMFINTSTTTPAPRPPTPAPTIASQPLSLRPEACRPAAGGAVHTRGLDFACDIYIWAPLAGTCGVLLLSLVITLYC

SEQ ID NO: 3749 - protein, 729 aa, synthetic construct
  REGION 1..729: note = Synthetic
MALPVTALLLPLALLLHAARPEVQLLESGGGLVQPGGSLRLSCAASGSLLSIYDMGWFRQAPGKEREFVSARIGKGGSTYYADSVKGRFTISRDNSKNTLYLQMNSLKPEDTAVYYCAVLVGEGESYGYHYWGQGTQVTVSSGGGGSGGGGSGGGGSEVQLLESGGGLVQPGGSLRLSCAASGSLLSIYDMGWFRQAPGKEREFVSARIGKGGSTYYADSVKGRFTISRDNSKNTLYLQMNSLKPEDTAVYYCAVLVGEGESYGYHYWGQGTQVTVSSAAATTTPAPRPPTPAPTIASQPLSLRPEACRPAAGGAVHTRGLDFACDIYIWAPLAGTCGVLLLSLVITLYCKRGRKKLLYIFKQPFMRPVQTTQEEDGCSCRFPEEEEGGCELRVKFSRSADAPAYQQGQNQLYNELNLGRREEYDVLDKRRGRDPEMGGKPRRKNPQEGLYNELQKDKMAEAYSEIGMKGERRRGKGHDGLYQGLSTATKDTYDALHMQALPPRGSGEGRGSLLTCGDVEENPGPMALPVTALLLPLALLLHAARPNWVNVISDLKKIEDLIQSMHIDATLYTESDVHPSCKVTAMKCFLLELQVISLESGDASIHDTVENLIILANNSLSSNGNVTESGCKECEELEEKNIKEFLQSFVHIVQMFINTSTTTPAPRPPTPAPTIASQPLSLRPEACRPAAGGAVHTRGLDFACDIYIWAPLAGTCGVLLLSLVITLYC

SEQ ID NO: 3750 - protein, 733 aa, synthetic construct
  REGION 1..733: note = Synthetic
MALPVTALLLPLALLLHAARPEVQLLESGGGLVQPGGSLRLSCAASGIGLSIYFMGWFRQAPGKEREFVSAIISSSGSTYYADSVKGRFTISRDNSKNTLYLQMNSLKPEDTAVYYCAARTGYSEYEQEDYGYWGQGTQVTVSSGGGGSGGGGSGGGGSEVQLLESGGGLVQPGGSLRLSCAASGIGLSIYFMGWFRQAPGKEREFVSAIISSSGSTYYADSVKGRFTISRDNSKNTLYLQMNSLKPEDTAVYYCAARTGYSEYEQEDYGYWGQGTQVTVSSAAATTTPAPRPPTPAPTIASQPLSLRPEACRPAAGGAVHTRGLDFACDIYIWAPLAGTCGVLLLSLVITLYCKRGRKKLLYIFKQPFMRPVQTTQEEDGCSCRFPEEEEGGCELRVKFSRSADAPAYQQGQNQLYNELNLGRREEYDVLDKRRGRDPEMGGKPRRKNPQEGLYNELQKDKMAEAYSEIGMKGERRRGKGHDGLYQGLSTATKDTYDALHMQALPPRGSGEGRGSLLTCGDVEENPGPMALPVTALLLPLALLLHAARPNWVNVISDLKKIEDLIQSMHIDATLYTESDVHPSCKVTAMKCFLLELQVISLESGDASIHDTVENLIILANNSLSSNGNVTESGCKECEELEEKNIKEFLQSFVHIVQMFINTSTTTPAPRPPTPAPTIASQPLSLRPEACRPAAGGAVHTRGLDFACDIYIWAPLAGTCGVLLLSLVITLYC

SEQ ID NO: 3751 - protein, 731 aa, synthetic construct
  REGION 1..731: note = Synthetic
MALPVTALLLPLALLLHAARPEVQLLESGGGLVQPGGSLRLSCAASGSIFSSSFIGWFRQAPGKEREFVSAVIASSGSTYYADSVKGRFTISRDNSKNTLYLQMNSLKPEDTAVYYCAGRFGQGGGTVEYGYWGQGTQVTVSSGGGGSGGGGSGGGGSEVQLLESGGGLVQPGGSLRLSCAASGSIFSSSFIGWFRQAPGKEREFVSAVIASSGSTYYADSVKGRFTISRDNSKNTLYLQMNSLKPEDTAVYYCAGRFGQGGGTVEYGYWGQGTQVTVSSAAATTTPAPRPPTPAPTIASQPLSLRPEACRPAAGGAVHTRGLDFACDIYIWAPLAGTCGVLLLSLVITLYCKRGRKKLLYIFKQPFMRPVQTTQEEDGCSCRFPEEEEGGCELRVKFSRSADAPAYQQGQNQLYNELNLGRREEYDVLDKRRGRDPEMGGKPRRKNPQEGLYNELQKDKMAEAYSEIGMKGERRRGKGHDGLYQGLSTATKDTYDALHMQALPPRGSGEGRGSLLTCGDVEENPGPMALPVTALLLPLALLLHAARPNWVNVISDLKKIEDLIQSMHIDATLYTESDVHPSCKVTAMKCFLLELQVISLESGDASIHDTVENLIILANNSLSSNGNVTESGCKECEELEEKNIKEFLQSFVHIVQMFINTSTTTPAPRPPTPAPTIASQPLSLRPEACRPAAGGAVHTRGLDFACDIYIWAPLAGTCGVLLLSLVITLYC

SEQ ID NO: 3752 - protein, 731 aa, synthetic construct
  REGION 1..731: note = Synthetic
MALPVTALLLPLALLLHAARPEVQLLESGGGLVQPGGSLRLSCAASGRVFSFYFMGWFRQAPGKEREFVSGVIGKTGSTYYTDSVKGRFTISRDNSKNTLYLQMNSLKPEDTAVYYCAASEYQGTGYGEFAYWGQGTQVTVSSGGGGSGGGGSGGGGSEVQLLESGGGLVQPGGSLRLSCAASGRVFSFYFMGWFRQAPGKEREFVSGVIGKTGSTYYTDSVKGRFTISRDNSKNTLYLQMNSLKPEDTAVYYCAASEYQGTGYGEFAYWGQGTQVTVSSAAATTTPAPRPPTPAPTIASQPLSLRPEACRPAAGGAVHTRGLDFACDIYIWAPLAGTCGVLLLSLVITLYCKRGRKKLLYIFKQPFMRPVQTTQEEDGCSCRFPEEEEGGCELRVKFSRSADAPAYQQGQNQLYNELNLGRREEYDVLDKRRGRDPEMGGKPRRKNPQEGLYNELQKDKMAEAYSEIGMKGERRRGKGHDGLYQGLSTATKDTYDALHMQALPPRGSGEGRGSLLTCGDVEENPGPMALPVTALLLPLALLLHAARPNWVNVISDLKKIEDLIQSMHIDATLYTESDVHPSCKVTAMKCFLLELQVISLESGDASIHDTVENLIILANNSLSSNGNVTESGCKECEELEEKNIKEFLQSFVHIVQMFINTSTTTPAPRPPTPAPTIASQPLSLRPEACRPAAGGAVHTRGLDFACDIYIWAPLAGTCGVLLLSLVITLYC

SEQ ID NO: 3753 - protein, 719 aa, synthetic construct
  REGION 1..719: note = Synthetic
MALPVTALLLPLALLLHAARPEVQLLESGGGLVQPGGSLRLSCAASGSLFEVEHIGWFRQAPGKEREFVSAQVTGGGYTYYADSVKGRFTISRDNSKNTLYLQMNSLKPEDTAVYYCYVRLVEEAYWGQGTQVTVSSGGGGSGGGGSGGGGSEVQLLESGGGLVQPGGSLRLSCAASGSLFEVEHIGWFRQAPGKEREFVSAQVTGGGYTYYADSVKGRFTISRDNSKNTLYLQMNSLKPEDTAVYYCYVRLVEEAYWGQGTQVTVSSAAATTTPAPRPPTPAPTIASQPLSLRPEACRPAAGGAVHTRGLDFACDIYIWAPLAGTCGVLLLSLVITLYCKRGRKKLLYIFKQPFMRPVQTTQEEDGCSCRFPEEEEGGCELRVKFSRSADAPAYQQGQNQLYNELNLGRREEYDVLDKRRGRDPEMGGKPRRKNPQEGLYNELQKDKMAEAYSEIGMKGERRRGKGHDGLYQGLSTATKDTYDALHMQALPPRGSGEGRGSLLTCGDVEENPGPMALPVTALLLPLALLLHAARPNWVNVISDLKKIEDLIQSMHIDATLYTESDVHPSCKVTAMKCFLLELQVISLESGDASIHDTVENLIILANNSLSSNGNVTESGCKECEELEEKNIKEFLQSFVHIVQMFINTSTTTPAPRPPTPAPTIASQPLSLRPEACRPAAGGAVHTRGLDFACDIYIWAPLAGTCGVLLLSLVITLYC

SEQ ID NO: 3754 - protein, 735 aa, synthetic construct
  REGION 1..735: note = Synthetic
MALPVTALLLPLALLLHAARPEVQLLESGGGLVQPGGSLRLSCAASGRIFGEYFIGWFRQAPGKEREFVSAIITGSGITHYADSVKGRFTISRDNSKNTLYLQMNSLKPEDTAVYYCAARTDYTTGQELPEYGYWGQGTQVTVSSGGGGSGGGGSGGGGSEVQLLESGGGLVQPGGSLRLSCAASGRIFGEYFIGWFRQAPGKEREFVSAIITGSGITHYADSVKGRFTISRDNSKNTLYLQMNSLKPEDTAVYYCAARTDYTTGQELPEYGYWGQGTQVTVSSAAATTTPAPRPPTPAPTIASQPLSLRPEACRPAAGGAVHTRGLDFACDIYIWAPLAGTCGVLLLSLVITLYCKRGRKKLLYIFKQPFMRPVQTTQEEDGCSCRFPEEEEGGCELRVKFSRSADAPAYQQGQNQLYNELNLGRREEYDVLDKRRGRDPEMGGKPRRKNPQEGLYNELQKDKMAEAYSEIGMKGERRRGKGHDGLYQGLSTATKDTYDALHMQALPPRGSGEGRGSLLTCGDVEENPGPMALPVTALLLPLALLLHAARPNWVNVISDLKKIEDLIQSMHIDATLYTESDVHPSCKVTAMKCFLLELQVISLESGDASIHDTVENLIILANNSLSSNGNVTESGCKECEELEEKNIKEFLQSFVHIVQMFINTSTTTPAPRPPTPAPTIASQPLSLRPEACRPAAGGAVHTRGLDFACDIYIWAPLAGTCGVLLLSLVITLYC

SEQ ID NO: 3755 - protein, 725 aa, synthetic construct
  REGION 1..725: note = Synthetic
MALPVTALLLPLALLLHAARPEVQLLESGGGLVQPGGSLRLSCAASGSIESIYFIGWFRQAPGKEREFVSAEFIPGGSTVYSDSVKGRFTISRDNSKNTLYLQMNSLKPEDTAVYYCNAGLDEGRYYTYWGQGTQVTVSSGGGGSGGGGSGGGGSEVQLLESGGGLVQPGGSLRLSCAASGSIESIYFIGWFRQAPGKEREFVSAEFIPGGSTVYSDSVKGRFTISRDNSKNTLYLQMNSLKPEDTAVYYCNAGLDEGRYYTYWGQGTQVTVSSAAATTTPAPRPPTPAPTIASQPLSLRPEACRPAAGGAVHTRGLDFACDIYIWAPLAGTCGVLLLSLVITLYCKRGRKKLLYIFKQPFMRPVQTTQEEDGCSCRFPEEEEGGCELRVKFSRSADAPAYQQGQNQLYNELNLGRREEYDVLDKRRGRDPEMGGKPRRKNPQEGLYNELQKDKMAEAYSEIGMKGERRRGKGHDGLYQGLSTATKDTYDALHMQALPPRGSGEGRGSLLTCGDVEENPGPMALPVTALLLPLALLLHAARPNWVNVISDLKKIEDLIQSMHIDATLYTESDVHPSCKVTAMKCFLLELQVISLESGDASIHDTVENLIILANNSLSSNGNVTESGCKECEELEEKNIKEFLQSFVHIVQMFINTSTTTPAPRPPTPAPTIASQPLSLRPEACRPAAGGAVHTRGLDFACDIYIWAPLAGTCGVLLLSLVITLYC

SEQ ID NO: 3756 - protein, 719 aa, synthetic construct
  REGION 1..719: note = Synthetic
MALPVTALLLPLALLLHAARPEVQLLESGGGLVQPGGSLRLSCAASGIEVSSSVVGWFRQAPGKEREFVSASGVGGSTYYADSVKGRFTISRDNSKNTLYLQMNSLKPEDTAVYYCYAVYLTIYTYWGQGTQVTVSSGGGGSGGGGSGGGGSEVQLLESGGGLVQPGGSLRLSCAASGIEVSSSVVGWFRQAPGKEREFVSASGVGGSTYYADSVKGRFTISRDNSKNTLYLQMNSLKPEDTAVYYCYAVYLTIYTYWGQGTQVTVSSAAATTTPAPRPPTPAPTIASQPLSLRPEACRPAAGGAVHTRGLDFACDIYIWAPLAGTCGVLLLSLVITLYCKRGRKKLLYIFKQPFMRPVQTTQEEDGCSCRFPEEEEGGCELRVKFSRSADAPAYQQGQNQLYNELNLGRREEYDVLDKRRGRDPEMGGKPRRKNPQEGLYNELQKDKMAEAYSEIGMKGERRRGKGHDGLYQGLSTATKDTYDALHMQALPPRGSGEGRGSLLTCGDVEENPGPMALPVTALLLPLALLLHAARPNWVNVISDLKKIEDLIQSMHIDATLYTESDVHPSCKVTAMKCFLLELQVISLESGDASIHDTVENLIILANNSLSSNGNVTESGCKECEELEEKNIKEFLQSFVHIVQMFINTSTTTPAPRPPTPAPTIASQPLSLRPEACRPAAGGAVHTRGLDFACDIYIWAPLAGTCGVLLLSLVITLYC

SEQ ID NO: 3757 - protein, 721 aa, synthetic construct
  REGION 1..721: note = Synthetic
MALPVTALLLPLALLLHAARPEVQLLESGGGLVQPGGSLRLSCAASGFTISRYAMAWFRQAPGKEREFVSGSIFVGGGTYYRDSVKGRFTISRDNSKNTLYLQMNSLKPEDTAVYYCYATVGDSYYYWGQGTQVTVSSGGGGSGGGGSGGGGSEVQLLESGGGLVQPGGSLRLSCAASGFTISRYAMAWFRQAPGKEREFVSGSIFVGGGTYYRDSVKGRFTISRDNSKNTLYLQMNSLKPEDTAVYYCYATVGDSYYYWGQGTQVTVSSAAATTTPAPRPPTPAPTIASQPLSLRPEACRPAAGGAVHTRGLDFACDIYIWAPLAGTCGVLLLSLVITLYCKRGRKKLLYIFKQPFMRPVQTTQEEDGCSCRFPEEEEGGCELRVKFSRSADAPAYQQGQNQLYNELNLGRREEYDVLDKRRGRDPEMGGKPRRKNPQEGLYNELQKDKMAEAYSEIGMKGERRRGKGHDGLYQGLSTATKDTYDALHMQALPPRGSGEGRGSLLTCGDVEENPGPMALPVTALLLPLALLLHAARPNWVNVISDLKKIEDLIQSMHIDATLYTESDVHPSCKVTAMKCFLLELQVISLESGDASIHDTVENLIILANNSLSSNGNVTESGCKECEELEEKNIKEFLQSFVHIVQMFINTSTTTPAPRPPTPAPTIASQPLSLRPEACRPAAGGAVHTRGLDFACDIYIWAPLAGTCGVLLLSLVITLYC

SEQ ID NO: 3758 - protein, 719 aa, synthetic construct
  REGION 1..719: note = Synthetic
MALPVTALLLPLALLLHAARPEVQLLESGGGLVQPGGSLRLSCAASGSLFSVEHIGWFRQAPGKEREFVSAQVTGGGYTYYADSVKGRFTISRDNSKNTLYLQMNSLKPEDTAVYYCYVRLVEEAYWGQGTQVTVSSGGGGSGGGGSGGGGSEVQLLESGGGLVQPGGSLRLSCAASGSLFSVEHIGWFRQAPGKEREFVSAQVTGGGYTYYADSVKGRFTISRDNSKNTLYLQMNSLKPEDTAVYYCYVRLVEEAYWGQGTQVTVSSAAATTTPAPRPPTPAPTIASQPLSLRPEACRPAAGGAVHTRGLDFACDIYIWAPLAGTCGVLLLSLVITLYCKRGRKKLLYIFKQPFMRPVQTTQEEDGCSCRFPEEEEGGCELRVKFSRSADAPAYQQGQNQLYNELNLGRREEYDVLDKRRGRDPEMGGKPRRKNPQEGLYNELQKDKMAEAYSEIGMKGERRRGKGHDGLYQGLSTATKDTYDALHMQALPPRGSGEGRGSLLTCGDVEENPGPMALPVTALLLPLALLLHAARPNWVNVISDLKKIEDLIQSMHIDATLYTESDVHPSCKVTAMKCFLLELQVISLESGDASIHDTVENLIILANNSLSSNGNVTESGCKECEELEEKNIKEFLQSFVHIVQMFINTSTTTPAPRPPTPAPTIASQPLSLRPEACRPAAGGAVHTRGLDFACDIYIWAPLAGTCGVLLLSLVITLYC

SEQ ID NO: 3759 - protein, 721 aa, synthetic construct
  REGION 1..721: note = Synthetic
MALPVTALLLPLALLLHAARPEVQLLESGGGLVQPGGSLRLSCAASGFIFSIYDMGWFRQAPGKEREFVSAISTTGGSIYYADSVKGRFTISRDNSKNTLYLQMNSLKPEDTAVYYCNADPLESYGYWGQGTQVTVSSGGGGSGGGGSGGGGSEVQLLESGGGLVQPGGSLRLSCAASGFIFSIYDMGWFRQAPGKEREFVSAISTTGGSIYYADSVKGRFTISRDNSKNTLYLQMNSLKPEDTAVYYCNADPLESYGYWGQGTQVTVSSAAATTTPAPRPPTPAPTIASQPLSLRPEACRPAAGGAVHTRGLDFACDIYIWAPLAGTCGVLLLSLVITLYCKRGRKKLLYIFKQPFMRPVQTTQEEDGCSCRFPEEEEGGCELRVKFSRSADAPAYQQGQNQLYNELNLGRREEYDVLDKRRGRDPEMGGKPRRKNPQEGLYNELQKDKMAEAYSEIGMKGERRRGKGHDGLYQGLSTATKDTYDALHMQALPPRGSGEGRGSLLTCGDVEENPGPMALPVTALLLPLALLLHAARPNWVNVISDLKKIEDLIQSMHIDATLYTESDVHPSCKVTAMKCFLLELQVISLESGDASIHDTVENLIILANNSLSSNGNVTESGCKECEELEEKNIKEFLQSFVHIVQMFINTSTTTPAPRPPTPAPTIASQPLSLRPEACRPAAGGAVHTRGLDFACDIYIWAPLAGTCGVLLLSLVITLYC

SEQ ID NO: 3760 - protein, 725 aa, synthetic construct
  REGION 1..725: note = Synthetic
MALPVTALLLPLALLLHAARPEVQLLESGGGLVQPGGSLRLSCAASGSVFSSYFIGWFRQAPGKEREFVSAVISSSGSTYYADSVKGRFTISRDNSKNTLYLQMNSLKPEDTAVYYCVAREDVGEPYGYWGQGTQVTVSSGGGGSGGGGSGGGGSEVQLLESGGGLVQPGGSLRLSCAASGSVFSSYFIGWFRQAPGKEREFVSAVISSSGSTYYADSVKGRFTISRDNSKNTLYLQMNSLKPEDTAVYYCVAREDVGEPYGYWGQGTQVTVSSAAATTTPAPRPPTPAPTIASQPLSLRPEACRPAAGGAVHTRGLDFACDIYIWAPLAGTCGVLLLSLVITLYCKRGRKKLLYIFKQPFMRPVQTTQEEDGCSCRFPEEEEGGCELRVKFSRSADAPAYQQGQNQLYNELNLGRREEYDVLDKRRGRDPEMGGKPRRKNPQEGLYNELQKDKMAEAYSEIGMKGERRRGKGHDGLYQGLSTATKDTYDALHMQALPPRGSGEGRGSLLTCGDVEENPGPMALPVTALLLPLALLLHAARPNWVNVISDLKKIEDLIQSMHIDATLYTESDVHPSCKVTAMKCFLLELQVISLESGDASIHDTVENLIILANNSLSSNGNVTESGCKECEELEEKNIKEFLQSFVHIVQMFINTSTTTPAPRPPTPAPTIASQPLSLRPEACRPAAGGAVHTRGLDFACDIYIWAPLAGTCGVLLLSLVITLYC

SEQ ID NO: 3761 - DNA, 2181 bp, synthetic construct
  misc_feature 1..2181: note = Synthetic
  source 1..2181: mol_type = other DNA
atggccttaccagtgaccgccttgctcctgccgctggccttgctgctccacgccgccaggccggaggtgcagctgttggagtctgggggaggcttggtacagcctggggggtccctgagactctcctgtgcagcctctggaaggggctttacaagctattacatgggatggttccgccaggctccagggaaggaacgggagttcgtctcagctgtgattttcccggagggttaccgctactacgcagactccgtgaagggccggttcaccatctccagagacaattccaagaacacgctgtatctgcaaatgaacagcctgaagcccgaggacacggccgtatattactgtgcgaaatacacaggtttcggtgaggacgcctatcgctactggggccaagggacccaggtcaccgtctcctcaggtggaggcggttcaggcggaggtggctctggcggtggcggatcggaggtgcagctgttggagtctgggggaggcttggtacagcctggggggtccctgagactctcctgtgcagcctctggaaggggctttacaagctattacatgggatggttccgccaggctccagggaaggaacgggagttcgtctcagctgtgattttcccggagggttaccgctactacgcagactccgtgaagggccggttcaccatctccagagacaattccaagaacacgctgtatctgcaaatgaacagcctgaagcccgaggacacggccgtatattactgtgcgaaatacacaggtttcggtgaggacgcctatcgctactggggccaagggacccaggtcaccgtctcctcagcggccgcaaccacgacgccagcgccgcggccaccaacaccggcgcccaccatcgcgtcgcagcccctgtccctgcgcccagaggcgtgccggccagcggcggggggcgcagtgcacacgagggggctggacttcgcctgtgatatctacatctgggcgcccttggccgggacttgtggggtccttctcctgtcactggttatcaccctttactgcaaacggggcagaaagaaactcctgtatatattcaaacaaccatttatgagaccagtacaaactactcaagaggaagatggctgtagctgccgatttccagaagaagaagaaggaggatgtgaactgagagtgaagttcagcaggagcgcagacgcccccgcgtaccagcagggccagaaccagctctataacgagctcaatctaggacgaagagaggagtacgatgttttggacaagagacgtggccgggaccctgagatggggggaaagccgagaaggaagaaccctcaggaaggcctgtacaatgaactgcagaaagataagatggcggaggcctacagtgagattgggatgaaaggcgagcgccggaggggcaaggggcacgatggcctttaccagggtctcagtacagccaccaaggacacctacgacgcccttcacatgcaggccctgccccctcgcggctctggcgagggaaggggttccctgcttacttgcggcgacgtcgaagagaatcccggtccgatggccctcccagtaactgccctccttttgcccctcgcactccttcttcatgccgctcgccccaactgggtcaacgtgattagcgatttgaagaaaatcgaggaccttatacagtctatgcatattgacgctacactgtatactgagagtgatgtacacccgtcctgtaaggtaacggccatgaaatgctttcttctggagctccaggtcatcagcttggagtctggggacgcaagcatccacgatacggttgaaaacctcatcatccttgcgaacaactctctctcatctaatggaaacgttacagagagtgggtgtaaggagtgcgaagagttggaagaaaaaaacatcaaagaatttcttcaatccttcgttcacatagtgcaaatgttcattaacacgtccactaccacacccgccccgaggccacctacgccggcaccgactatcgccagtcaacccctctctctgcgccccgaggcttgccggcctgcggctggtggggcggtccacacccggggcctggattttgcgtgcgatatatacatctgggcacctcttgccggcacctgcggagtgctgcttctctcactcgttattacgctgtactgc

SEQ ID NO: 3762 - DNA, 2175 bp, synthetic construct
  misc_feature 1..2175: note = Synthetic
  source 1..2175: mol_type = other DNA
atggccttaccagtgaccgccttgctcctgccgctggccttgctgctccacgccgccaggccggaggtgcagctgttggagtctgggggaggcttggtacagcctggggggtccctgagactctcctgtgcagcctctggactcacctttagcatacatactgtgggatggttccgccaggctccagggaaggaaagagagttcgtctcagctgcactgggtagtgggggtcgaccttactaccgcgactccgtgaagggccggttcaccatctccagagacaattccaagaacacgctgtatctgcaaatgaacagcctgaaaccagaggacacggccgtatattactgttatgttgacgtggggacagggctgtactatggctactggggccaagggacccaggtcaccgtctcctcaggtggaggcggttcaggcggaggtggctctggcggtggcggatcggaggtgcagctgttggagtctgggggaggcttggtacagcctggggggtccctgagactctcctgtgcagcctctggactcacctttagcatacatactgtgggatggttccgccaggctccagggaaggaaagagagttcgtctcagctgcactgggtagtgggggtcgaccttactaccgcgactccgtgaagggccggttcaccatctccagagacaattccaagaacacgctgtatctgcaaatgaacagcctgaaaccagaggacacggccgtatattactgttatgttgacgtggggacagggctgtactatggctactggggccaagggacccaggtcaccgtctcctcagcggccgcaaccacgacgccagcgccgcggccaccaacaccggcgcccaccatcgcgtcgcagcccctgtccctgcgcccagaggcgtgccggccagcggcggggggcgcagtgcacacgagggggctggacttcgcctgtgatatctacatctgggcgcccttggccgggacttgtggggtccttctcctgtcactggttatcaccctttactgcaaacggggcagaaagaaactcctgtatatattcaaacaaccatttatgagaccagtacaaactactcaagaggaagatggctgtagctgccgatttccagaagaagaagaaggaggatgtgaactgagagtgaagttcagcaggagcgcagacgcccccgcgtaccagcagggccagaaccagctctataacgagctcaatctaggacgaagagaggagtacgatgttttggacaagagacgtggccgggaccctgagatggggggaaagccgagaaggaagaaccctcaggaaggcctgtacaatgaactgcagaaagataagatggcggaggcctacagtgagattgggatgaaaggcgagcgccggaggggcaaggggcacgatggcctttaccagggtctcagtacagccaccaaggacacctacgacgcccttcacatgcaggccctgccccctcgcggctctggcgagggaaggggttccctgcttacttgcggcgacgtcgaagagaatcccggtccgatggccctcccagtaactgccctccttttgcccctcgcactccttcttcatgccgctcgccccaactgggtcaacgtgattagcgatttgaagaaaatcgaggaccttatacagtctatgcatattgacgctacactgtatactgagagtgatgtacacccgtcctgtaaggtaacggccatgaaatgctttcttctggagctccaggtcatcagcttggagtctggggacgcaagcatccacgatacggttgaaaacctcatcatccttgcgaacaactctctctcatctaatggaaacgttacagagagtgggtgtaaggagtgcgaagagttggaagaaaaaaacatcaaagaatttcttcaatccttcgttcacatagtgcaaatgttcattaacacgtccactaccacacccgccccgaggccacctacgccggcaccgactatcgccagtcaacccctctctctgcgccccgaggcttgccggcctgcggctggtggggcggtccacacccggggcctggattttgcgtgcgatatatacatctgggcacctcttgccggcacctgcggagtgctgcttctctcactcgttattacgctgtactgc

SEQ ID NO: 3763 - DNA, 2193 bp, synthetic construct
  misc_feature 1..2193: note = Synthetic
  source 1..2193: mol_type = other DNA
atggccttaccagtgaccgccttgctcctgccgctggccttgctgctccacgccgccaggccggaggtgcagctgttggagtctgggggaggcttggtacagcctggggggtccctgagactctcctgtgcagcctctggaaggatctttagcagctattttatggggtggtttcgccaggctccagggaaggaacgggagtttgtctcagcccatattagtagcgaaggtagcacatactacagagactccgtgaagggccggttcaccatctccagagacaattccaagaacacgctgtatctgcaaatgaacagcctgaaaccagaggacacggccgtatattactgtgcggcccgcgagtacgcggatacacagcgcggcgagtacgcttactggggccaagggacccaagtcaccgtctcctcaggtggaggcggttcaggcggaggtggctctggcggtggcggatcggaggtgcagctgttggagtctgggggaggcttggtacagcctggggggtccctgagactctcctgtgcagcctctggaaggatctttagcagctattttatggggtggtttcgccaggctccagggaaggaacgggagtttgtctcagcccatattagtagcgaaggtagcacatactacagagactccgtgaagggccggttcaccatctccagagacaattccaagaacacgctgtatctgcaaatgaacagcctgaaaccagaggacacggccgtatattactgtgcggcccgcgagtacgcggatacacagcgcggcgagtacgcttactggggccaagggacccaagtcaccgtctcctcagcggccgcaaccacgacgccagcgccgcggccaccaacaccggcgcccaccatcgcgtcgcagcccctgtccctgcgcccagaggcgtgccggccagcggcggggggcgcagtgcacacgagggggctggacttcgcctgtgatatctacatctgggcgcccttggccgggacttgtggggtccttctcctgtcactggttatcaccctttactgcaaacggggcagaaagaaactcctgtatatattcaaacaaccatttatgagaccagtacaaactactcaagaggaagatggctgtagctgccgatttccagaagaagaagaaggaggatgtgaactgagagtgaagttcagcaggagcgcagacgcccccgcgtaccagcagggccagaaccagctctataacgagctcaatctaggacgaagagaggagtacgatgttttggacaagagacgtggccgggaccctgagatggggggaaagccgagaaggaagaaccctcaggaaggcctgtacaatgaactgcagaaagataagatggcggaggcctacagtgagattgggatgaaaggcgagcgccggaggggcaaggggcacgatggcctttaccagggtctcagtacagccaccaaggacacctacgacgcccttcacatgcaggccctgccccctcgcggctctggcgagggaaggggttccctgcttacttgcggcgacgtcgaagagaatcccggtccgatggccctcccagtaactgccctccttttgcccctcgcactccttcttcatgccgctcgccccaactgggtcaacgtgattagcgatttgaagaaaatcgaggaccttatacagtctatgcatattgacgctacactgtatactgagagtgatgtacacccgtcctgtaaggtaacggccatgaaatgctttcttctggagctccaggtcatcagcttggagtctggggacgcaagcatccacgatacggttgaaaacctcatcatccttgcgaacaactctctctcatctaatggaaacgttacagagagtgggtgtaaggagtgcgaagagttggaagaaaaaaacatcaaagaatttcttcaatccttcgttcacatagtgcaaatgttcattaacacgtccactaccacacccgccccgaggccacctacgccggcaccgactatcgccagtcaacccctctctctgcgccccgaggcttgccggcctgcggctggtggggcggtccacacccggggcctggattttgcgtgcgatatatacatctgggcacctcttgccggcacctgcggagtgctgcttctctcactcgttattacgctgtactgc

SEQ ID NO: 3764 - DNA, 2163 bp, synthetic construct
  misc_feature 1..2163: note = Synthetic
  source 1..2163: mol_type = other DNA
atggccttaccagtgaccgccttgctcctgccgctggccttgctgctccacgccgccaggccggaggtgcagctgttggagtctgggggaggcttggtacagcctggggggtccctgagactctcctgtgcagcctctggatctatagtcagcagctatgccatgggctggttccgccaggctccagggaaggaaagagagttcgtctcatccgctattggaaagggtggtgtaacaatttatgcagactccgtgaagggccggttcaccatctccagagataattccaagaacacgctgtatctgcaaatgaacagcctgaagccagaggacacggccgtatattactgtgcgacagatgagtctacttaccgtgactactggggccaagggacccaggtcaccgtctcctcaggtggaggcggttcaggcggaggtggctctggcggtggcggatcggaggtgcagctgttggagtctgggggaggcttggtacagcctggggggtccctgagactctcctgtgcagcctctggatctatagtcagcagctatgccatgggctggttccgccaggctccagggaaggaaagagagttcgtctcatccgctattggaaagggtggtgtaacaatttatgcagactccgtgaagggccggttcaccatctccagagataattccaagaacacgctgtatctgcaaatgaacagcctgaagccagaggacacggccgtatattactgtgcgacagatgagtctacttaccgtgactactggggccaagggacccaggtcaccgtctcctcagcggccgcaaccacgacgccagcgccgcggccaccaacaccggcgcccaccatcgcgtcgcagcccctgtccctgcgcccagaggcgtgccggccagcggcggggggcgcagtgcacacgagggggctggacttcgcctgtgatatctacatctgggcgcccttggccgggacttgtggggtccttctcctgtcactggttatcaccctttactgcaaacggggcagaaagaaactcctgtatatattcaaacaaccatttatgagaccagtacaaactactcaagaggaagatggctgtagctgccgatttccagaagaagaagaaggaggatgtgaactgagagtgaagttcagcaggagcgcagacgcccccgcgtaccagcagggccagaaccagctctataacgagctcaatctaggacgaagagaggagtacgatgttttggacaagagacgtggccgggaccctgagatggggggaaagccgagaaggaagaaccctcaggaaggcctgtacaatgaactgcagaaagataagatggcggaggcctacagtgagattgggatgaaaggcgagcgccggaggggcaaggggcacgatggcctttaccagggtctcagtacagccaccaaggacacctacgacgcccttcacatgcaggccctgccccctcgcggctctggcgagggaaggggttccctgcttacttgcggcgacgtcgaagagaatcccggtccgatggccctcccagtaactgccctccttttgcccctcgcactccttcttcatgccgctcgccccaactgggtcaacgtgattagcgatttgaagaaaatcgaggaccttatacagtctatgcatattgacgctacactgtatactgagagtgatgtacacccgtcctgtaaggtaacggccatgaaatgctttcttctggagctccaggtcatcagcttggagtctggggacgcaagcatccacgatacggttgaaaacctcatcatccttgcgaacaactctctctcatctaatggaaacgttacagagagtgggtgtaaggagtgcgaagagttggaagaaaaaaacatcaaagaatttcttcaatccttcgttcacatagtgcaaatgttcattaacacgtccactaccacacccgccccgaggccacctacgccggcaccgactatcgccagtcaacccctctctctgcgccccgaggcttgccggcctgcggctggtggggcggtccacacccggggcctggattttgcgtgcgatatatacatctgggcacctcttgccggcacctgcggagtgctgcttctctcactcgttattacgctgtactgc

SEQ ID NO: 3765 - DNA, 2157 bp, synthetic construct
  misc_feature 1..2157: note = Synthetic
  source 1..2157: mol_type = other DNA
atggccttaccagtgaccgccttgctcctgccgctggccttgctgctccacgccgccaggccggaggtgcagctgttggagtctgggggaggcttggtacagcctggggggtccctgagactctcctgtgcagcctctggatcactatttcaggtggagcacatcgggtggtttcgccaggctccagggaaggaaagagatttcgtctcagctcaagtcaccggtggcggttatacatactacgcagactccgtgaagggccggttcaccatctccagagacaattccaagaacacgctgtatctgcaaatgaacagcctgaaaccggaggacacggccgtatattactgttacgtacggctcgtggaagaagcatactggggccaagggacccaagtcaccgtctcctcaggtggaggcggttcaggcggaggtggctctggcggtggcggatcggaggtgcagctgttggagtctgggggaggcttggtacagcctggggggtccctgagactctcctgtgcagcctctggatcactatttcaggtggagcacatcgggtggtttcgccaggctccagggaaggaaagagatttcgtctcagctcaagtcaccggtggcggttatacatactacgcagactccgtgaagggccggttcaccatctccagagacaattccaagaacacgctgtatctgcaaatgaacagcctgaaaccggaggacacggccgtatattactgttacgtacggctcgtggaagaagcatactggggccaagggacccaagtcaccgtctcctcagcggccgcaaccacgacgccagcgccgcggccaccaacaccggcgcccaccatcgcgtcgcagcccctgtccctgcgcccagaggcgtgccggccagcggcggggggcgcagtgcacacgagggggctggacttcgcctgtgatatctacatctgggcgcccttggccgggacttgtggggtccttctcctgtcactggttatcaccctttactgcaaacggggcagaaagaaactcctgtatatattcaaacaaccatttatgagaccagtacaaactactcaagaggaagatggctgtagctgccgatttccagaagaagaagaaggaggatgtgaactgagagtgaagttcagcaggagcgcagacgcccccgcgtaccagcagggccagaaccagctctataacgagctcaatctaggacgaagagaggagtacgatgttttggacaagagacgtggccgggaccctgagatggggggaaagccgagaaggaagaaccctcaggaaggcctgtacaatgaactgcagaaagataagatggcggaggcctacagtgagattgggatgaaaggcgagcgccggaggggcaaggggcacgatggcctttaccagggtctcagtacagccaccaaggacacctacgacgcccttcacatgcaggccctgccccctcgcggctctggcgagggaaggggttccctgcttacttgcggcgacgtcgaagagaatcccggtccgatggccctcccagtaactgccctccttttgcccctcgcactccttcttcatgccgctcgccccaactgggtcaacgtgattagcgatttgaagaaaatcgaggaccttatacagtctatgcatattgacgctacactgtatactgagagtgatgtacacccgtcctgtaaggtaacggccatgaaatgctttcttctggagctccaggtcatcagcttggagtctggggacgcaagcatccacgatacggttgaaaacctcatcatccttgcgaacaactctctctcatctaatggaaacgttacagagagtgggtgtaaggagtgcgaagagttggaagaaaaaaacatcaaagaatttcttcaatccttcgttcacatagtgcaaatgttcattaacacgtccactaccacacccgccccgaggccacctacgccggcaccgactatcgccagtcaacccctctctctgcgccccgaggcttgccggcctgcggctggtggggcggtccacacccggggcctggattttgcgtgcgatatatacatctgggcacctcttgccggcacctgcggagtgctgcttctctcactcgttattacgctgtactgc

SEQ ID NO: 3766 - DNA, 2193 bp, synthetic construct
  misc_feature 1..2193: note = Synthetic
  source 1..2193: mol_type = other DNA
atggccttaccagtgaccgccttgctcctgccgctggccttgctgctccacgccgccaggccggaggtgcagctgttggagtctgggggaggcttggtacagcctggggggtccctgagactctcctgtgcagcctctggaacaacctttgccagctctttcatgggatggttccgccaggctccagggaaggagcgcgagtttgtctcagctattgtttttccggggggtagcacatactacgcagactccgtgaagggccggttcaccatctccagagacaattccaagaacacgctgtatctgcaaatgaacagcctgaagcctgaggacacggccgtatattactgtgcggctagaagatatgagttggtggacaggctggagtacgcctactggggccaagggacccaggtcaccgtctcctcaggtggaggcggttcaggcggaggtggctctggcggtggcggatcggaggtgcagctgttggagtctgggggaggcttggtacagcctggggggtccctgagactctcctgtgcagcctctggaacaacctttgccagctctttcatgggatggttccgccaggctccagggaaggagcgcgagtttgtctcagctattgtttttccggggggtagcacatactacgcagactccgtgaagggccggttcaccatctccagagacaattccaagaacacgctgtatctgcaaatgaacagcctgaagcctgaggacacggccgtatattactgtgcggctagaagatatgagttggtggacaggctggagtacgcctactggggccaagggacccaggtcaccgtctcctcagcggccgcaaccacgacgccagcgccgcggccaccaacaccggcgcccaccatcgcgtcgcagcccctgtccctgcgcccagaggcgtgccggccagcggcggggggcgcagtgcacacgagggggctggacttcgcctgtgatatctacatctgggcgcccttggccgggacttgtggggtccttctcctgtcactggttatcaccctttactgcaaacggggcagaaagaaactcctgtatatattcaaacaaccatttatgagaccagtacaaactactcaagaggaagatggctgtagctgccgatttccagaagaagaagaaggaggatgtgaactgagagtgaagttcagcaggagcgcagacgcccccgcgtaccagcagggccagaaccagctctataacgagctcaatctaggacgaagagaggagtacgatgttttggacaagagacgtggccgggaccctgagatggggggaaagccgagaaggaagaaccctcaggaaggcctgtacaatgaactgcagaaagataagatggcggaggcctacagtgagattgggatgaaaggcgagcgccggaggggcaaggggcacgatggcctttaccagggtctcagtacagccaccaaggacacctacgacgcccttcacatgcaggccctgccccctcgcggctctggcgagggaaggggttccctgcttacttgcggcgacgtcgaagagaatcccggtccgatggccctcccagtaactgccctccttttgcccctcgcactccttcttcatgccgctcgccccaactgggtcaacgtgattagcgatttgaagaaaatcgaggaccttatacagtctatgcatattgacgctacactgtatactgagagtgatgtacacccgtcctgtaaggtaacggccatgaaatgctttcttctggagctccaggtcatcagcttggagtctggggacgcaagcatccacgatacggttgaaaacctcatcatccttgcgaacaactctctctcatctaatggaaacgttacagagagtgggtgtaaggagtgcgaagagttggaagaaaaaaacatcaaagaatttcttcaatccttcgttcacatagtgcaaatgttcattaacacgtccactaccacacccgccccgaggccacctacgccggcaccgactatcgccagtcaacccctctctctgcgccccgaggcttgccggcctgcggctggtggggcggtccacacccggggcctggattttgcgtgcgatatatacatctgggcacctcttgccggcacctgcggagtgctgcttctctcactcgttattacgctgtactgc

SEQ ID NO: 3767 - DNA, 2163 bp, synthetic construct
  misc_feature 1..2163: note = Synthetic
  source 1..2163: mol_type = other DNA
atggccttaccagtgaccgccttgctcctgccgctggccttgctgctccacgccgccaggccggaggtgcagctgttggagtctgggggaggcttggtacagcctggggggtccctgagactctcctgtgcagcctctggaagcgtgtttagcagctttactattgggtggtttcgccaggctccagggaaggagcgcgagtttgtctcagctattgtcactagcaccggtagtacatactatgcagactccgtgaagggccggttcaccatctccagagacaattccaagaacacgctgtatctgcaaatgaacagcctgaaaccggaggacacggccgtatattactgtaatgtgaggacacaggaggactattactactggggccaagggacccaggtcaccgtctcctcaggtggaggcggttcaggcggaggtggctctggcggtggcggatcggaggtgcagctgttggagtctgggggaggcttggtacagcctggggggtccctgagactctcctgtgcagcctctggaagcgtgtttagcagctttactattgggtggtttcgccaggctccagggaaggagcgcgagtttgtctcagctattgtcactagcaccggtagtacatactatgcagactccgtgaagggccggttcaccatctccagagacaattccaagaacacgctgtatctgcaaatgaacagcctgaaaccggaggacacggccgtatattactgtaatgtgaggacacaggaggactattactactggggccaagggacccaggtcaccgtctcctcagcggccgcaaccacgacgccagcgccgcggccaccaacaccggcgcccaccatcgcgtcgcagcccctgtccctgcgcccagaggcgtgccggccagcggcggggggcgcagtgcacacgagggggctggacttcgcctgtgatatctacatctgggcgcccttggccgggacttgtggggtccttctcctgtcactggttatcaccctttactgcaaacggggcagaaagaaactcctgtatatattcaaacaaccatttatgagaccagtacaaactactcaagaggaagatggctgtagctgccgatttccagaagaagaagaaggaggatgtgaactgagagtgaagttcagcaggagcgcagacgcccccgcgtaccagcagggccagaaccagctctataacgagctcaatctaggacgaagagaggagtacgatgttttggacaagagacgtggccgggaccctgagatggggggaaagccgagaaggaagaaccctcaggaaggcctgtacaatgaactgcagaaagataagatggcggaggcctacagtgagattgggatgaaaggcgagcgccggaggggcaaggggcacgatggcctttaccagggtctcagtacagccaccaaggacacctacgacgcccttcacatgcaggccctgccccctcgcggctctggcgagggaaggggttccctgcttacttgcggcgacgtcgaagagaatcccggtccgatggccctcccagtaactgccctccttttgcccctcgcactccttcttcatgccgctcgccccaactgggtcaacgtgattagcgatttgaagaaaatcgaggaccttatacagtctatgcatattgacgctacactgtatactgagagtgatgtacacccgtcctgtaaggtaacggccatgaaatgctttcttctggagctccaggtcatcagcttggagtctggggacgcaagcatccacgatacggttgaaaacctcatcatccttgcgaacaactctctctcatctaatggaaacgttacagagagtgggtgtaaggagtgcgaagagttggaagaaaaaaacatcaaagaatttcttcaatccttcgttcacatagtgcaaatgttcattaacacgtccactaccacacccgccccgaggccacctacgccggcaccgactatcgccagtcaacccctctctctgcgccccgaggcttgccggcctgcggctggtggggcggtccacacccggggcctggattttgcgtgcgatatatacatctgggcacctcttgccggcacctgcggagtgctgcttctctcactcgttattacgctgtactgc

SEQ ID NO: 3768 - DNA, 2193 bp, synthetic construct
  misc_feature 1..2193: note = Synthetic
  source 1..2193: mol_type = other DNA
atggccttaccagtgaccgccttgctcctgccgctggccttgctgctccacgccgccaggccggaggtgcagctgttggagtctgggggaggcttggtacagcctggggggtccctgagactctcctgtgcagcctctggaagcatttttggcagccacttcatgggctggtttcgccaggctccagggaaggagcgggagttcgtctcagctgcggttaccagcggaggtagtacatactatgcagactccgtgaagggccggttcaccatctccagagacaattccaagaacacgctgtatctgcaaatgaacagcctgaaacctgaggacacggccgtatattactgtgcggctcgaacctaccagtcaacgtatcagcctgaatatgcctactggggccaagggacccaggtcaccgtctcctcaggtggaggcggttcaggcggaggtggctctggcggtggcggatcggaggtgcagctgttggagtctgggggaggcttggtacagcctggggggtccctgagactctcctgtgcagcctctggaagcatttttggcagccacttcatgggctggtttcgccaggctccagggaaggagcgggagttcgtctcagctgcggttaccagcggaggtagtacatactatgcagactccgtgaagggccggttcaccatctccagagacaattccaagaacacgctgtatctgcaaatgaacagcctgaaacctgaggacacggccgtatattactgtgcggctcgaacctaccagtcaacgtatcagcctgaatatgcctactggggccaagggacccaggtcaccgtctcctcagcggccgcaaccacgacgccagcgccgcggccaccaacaccggcgcccaccatcgcgtcgcagcccctgtccctgcgcccagaggcgtgccggccagcggcggggggcgcagtgcacacgagggggctggacttcgcctgtgatatctacatctgggcgcccttggccgggacttgtggggtccttctcctgtcactggttatcaccctttactgcaaacggggcagaaagaaactcctgtatatattcaaacaaccatttatgagaccagtacaaactactcaagaggaagatggctgtagctgccgatttccagaagaagaagaaggaggatgtgaactgagagtgaagttcagcaggagcgcagacgcccccgcgtaccagcagggccagaaccagctctataacgagctcaatctaggacgaagagaggagtacgatgttttggacaagagacgtggccgggaccctgagatggggggaaagccgagaaggaagaaccctcaggaaggcctgtacaatgaactgcagaaagataagatggcggaggcctacagtgagattgggatgaaaggcgagcgccggaggggcaaggggcacgatggcctttaccagggtctcagtacagccaccaaggacacctacgacgcccttcacatgcaggccctgccccctcgcggctctggcgagggaaggggttccctgcttacttgcggcgacgtcgaagagaatcccggtccgatggccctcccagtaactgccctccttttgcccctcgcactccttcttcatgccgctcgccccaactgggtcaacgtgattagcgatttgaagaaaatcgaggaccttatacagtctatgcatattgacgctacactgtatactgagagtgatgtacacccgtcctgtaaggtaacggccatgaaatgctttcttctggagctccaggtcatcagcttggagtctggggacgcaagcatccacgatacggttgaaaacctcatcatccttgcgaacaactctctctcatctaatggaaacgttacagagagtgggtgtaaggagtgcgaagagttggaagaaaaaaacatcaaagaatttcttcaatccttcgttcacatagtgcaaatgttcattaacacgtccactaccacacccgccccgaggccacctacgccggcaccgactatcgccagtcaacccctctctctgcgccccgaggcttgccggcctgcggctggtggggcggtccacacccggggcctggattttgcgtgcgatatatacatctgggcacctcttgccggcacctgcggagtgctgcttctctcactcgttattacgctgtactgc

SEQ ID NO: 3769 - DNA, 2205 bp, synthetic construct
  misc_feature 1..2205: note = Synthetic
  source 1..2205: mol_type = other DNA
atggccttaccagtgaccgccttgctcctgccgctggccttgctgctccacgccgccaggccggaggtgcagctgttggagtctgggggaggcttggtacagcctggggggtccctgagactctcctgtgcagcctctggatctatctttagcatcctggacatcgggtggttccgccaggctccagggaaggaacgagagttcgtctcagcctatattagcagcggtggtagtacatactattccgactccgtgaagggccggttcaccatctccagagataattccaagaacacgctgtatctgcaaatgaacagcctgaagccagaggacacggccgtatattactgtgtggctaccatctttggtgatcgtaccgagggccaggaaaggtacgctttctggggccaagggacccaagtcaccgtctcctcaggtggaggcggttcaggcggaggtggctctggcggtggcggatcggaggtgcagctgttggagtctgggggaggcttggtacagcctggggggtccctgagactctcctgtgcagcctctggatctatctttagcatcctggacatcgggtggttccgccaggctccagggaaggaacgagagttcgtctcagcctatattagcagcggtggtagtacatactattccgactccgtgaagggccggttcaccatctccagagataattccaagaacacgctgtatctgcaaatgaacagcctgaagccagaggacacggccgtatattactgtgtggctaccatctttggtgatcgtaccgagggccaggaaaggtacgctttctggggccaagggacccaagtcaccgtctcctcagcggccgcaaccacgacgccagcgccgcggccaccaacaccggcgcccaccatcgcgtcgcagcccctgtccctgcgcccagaggcgtgccggccagcggcggggggcgcagtgcacacgagggggctggacttcgcctgtgatatctacatctgggcgcccttggccgggacttgtggggtccttctcctgtcactggttatcaccctttactgcaaacggggcagaaagaaactcctgtatatattcaaacaaccatttatgagaccagtacaaactactcaagaggaagatggctgtagctgccgatttccagaagaagaagaaggaggatgtgaactgagagtgaagttcagcaggagcgcagacgcccccgcgtaccagcagggccagaaccagctctataacgagctcaatctaggacgaagagaggagtacgatgttttggacaagagacgtggccgggaccctgagatggggggaaagccgagaaggaagaaccctcaggaaggcctgtacaatgaactgcagaaagataagatggcggaggcctacagtgagattgggatgaaaggcgagcgccggaggggcaaggggcacgatggcctttaccagggtctcagtacagccaccaaggacacctacgacgcccttcacatgcaggccctgccccctcgcggctctggcgagggaaggggttccctgcttacttgcggcgacgtcgaagagaatcccggtccgatggccctcccagtaactgccctccttttgcccctcgcactccttcttcatgccgctcgccccaactgggtcaacgtgattagcgatttgaagaaaatcgaggaccttatacagtctatgcatattgacgctacactgtatactgagagtgatgtacacccgtcctgtaaggtaacggccatgaaatgctttcttctggagctccaggtcatcagcttggagtctggggacgcaagcatccacgatacggttgaaaacctcatcatccttgcgaacaactctctctcatctaatggaaacgttacagagagtgggtgtaaggagtgcgaagagttggaagaaaaaaacatcaaagaatttcttcaatccttcgttcacatagtgcaaatgttcattaacacgtccactaccacacccgccccgaggccacctacgccggcaccgactatcgccagtcaacccctctctctgcgccccgaggcttgccggcctgcggctggtggggcggtccacacccggggcctggattttgcgtgcgatatatacatctgggcacctcttgccggcacctgcggagtgctgcttctctcactcgttattacgctgtactgc

SEQ ID NO: 3770 - DNA, 2193 bp, synthetic construct
  misc_feature 1..2193: note = Synthetic
  source 1..2193: mol_type = other DNA
atggccttaccagtgaccgccttgctcctgccgctggccttgctgctccacgccgccaggccggaggtgcagctgttggagtctgggggaggcttggtacagcctggggggtccctgagactctcctgtgcagcctctggaagcaccacgagcagctattttatgggatggttccgccaggctccagggaaggaacgcgagtttgtctcagctattataactagcagtggtagtccctactatgcagactccgtgaagggccggttcaccatctccagagacaattccaagaacacgctgtatctgcaaatgaacagcctgaaacccgaggacacggccgtatattactgtgcggcgcgtcggtatgggtcgagggaaacggacgactatgggtactggggccaagggacccaggtcaccgtctcctcaggtggaggcggttcaggcggaggtggctctggcggtggcggatcggaggtgcagctgttggagtctgggggaggcttggtacagcctggggggtccctgagactctcctgtgcagcctctggaagcaccacgagcagctattttatgggatggttccgccaggctccagggaaggaacgcgagtttgtctcagctattataactagcagtggtagtccctactatgcagactccgtgaagggccggttcaccatctccagagacaattccaagaacacgctgtatctgcaaatgaacagcctgaaacccgaggacacggccgtatattactgtgcggcgcgtcggtatgggtcgagggaaacggacgactatgggtactggggccaagggacccaggtcaccgtctcctcagcggccgcaaccacgacgccagcgccgcggccaccaacaccggcgcccaccatcgcgtcgcagcccctgtccctgcgcccagaggcgtgccggccagcggcggggggcgcagtgcacacgagggggctggacttcgcctgtgatatctacatctgggcgcccttggccgggacttgtggggtccttctcctgtcactggttatcaccctttactgcaaacggggcagaaagaaactcctgtatatattcaaacaaccatttatgagaccagtacaaactactcaagaggaagatggctgtagctgccgatttccagaagaagaagaaggaggatgtgaactgagagtgaagttcagcaggagcgcagacgcccccgcgtaccagcagggccagaaccagctctataacgagctcaatctaggacgaagagaggagtacgatgttttggacaagagacgtggccgggaccctgagatggggggaaagccgagaaggaagaaccctcaggaaggcctgtacaatgaactgcagaaagataagatggcggaggcctacagtgagattgggatgaaaggcgagcgccggaggggcaaggggcacgatggcctttaccagggtctcagtacagccaccaaggacacctacgacgcccttcacatgcaggccctgccccctcgcggctctggcgagggaaggggttccctgcttacttgcggcgacgtcgaagagaatcccggtccgatggccctcccagtaactgccctccttttgcccctcgcactccttcttcatgccgctcgccccaactgggtcaacgtgattagcgatttgaagaaaatcgaggaccttatacagtctatgcatattgacgctacactgtatactgagagtgatgtacacccgtcctgtaaggtaacggccatgaaatgctttcttctggagctccaggtcatcagcttggagtctggggacgcaagcatccacgatacggttgaaaacctcatcatccttgcgaacaactctctctcatctaatggaaacgttacagagagtgggtgtaaggagtgcgaagagttggaagaaaaaaacatcaaagaatttcttcaatccttcgttcacatagtgcaaatgttcattaacacgtccactaccacacccgccccgaggccacctacgccggcaccgactatcgccagtcaacccctctctctgcgccccgaggcttgccggcctgcggctggtggggcggtccacacccggggcctggattttgcgtgcgatatatacatctgggcacctcttgccggcacctgcggagtgctgcttctctcactcgttattacgctgtactgc

SEQ ID NO: 3771 - DNA, 2199 bp, synthetic construct
  misc_feature 1..2199: note = Synthetic
  source 1..2199: mol_type = other DNA
atggccttaccagtgaccgccttgctcctgccgctggccttgctgctccacgccgccaggccggaggtgcagctgttggagtctgggggaggcttggtacagcctggggggtccctgagactctcctgtgcagcctctggatctgtctttagcagctatagcatgtggtttcgccaggctccagggaaggaacgcgagtttgtctcagctattatcactagtggcggtagcacatactacgcagactccgtgaagggccggttcaccatctccagagacaattccaagaacacgctgtatctgcaaatgaacagcctgaaacccgaggacacggccgtatattactgtgtggccgtttacggcataggaactggacaatacatcggtacatatgacatctggggccaagggacccaggtcaccgtctcctcaggtggaggcggttcaggcggaggtggctctggcggtggcggatcggaggtgcagctgttggagtctgggggaggcttggtacagcctggggggtccctgagactctcctgtgcagcctctggatctgtctttagcagctatagcatgtggtttcgccaggctccagggaaggaacgcgagtttgtctcagctattatcactagtggcggtagcacatactacgcagactccgtgaagggccggttcaccatctccagagacaattccaagaacacgctgtatctgcaaatgaacagcctgaaacccgaggacacggccgtatattactgtgtggccgtttacggcataggaactggacaatacatcggtacatatgacatctggggccaagggacccaggtcaccgtctcctcagcggccgcaaccacgacgccagcgccgcggccaccaacaccggcgcccaccatcgcgtcgcagcccctgtccctgcgcccagaggcgtgccggccagcggcggggggcgcagtgcacacgagggggctggacttcgcctgtgatatctacatctgggcgcccttggccgggacttgtggggtccttctcctgtcactggttatcaccctttactgcaaacggggcagaaagaaactcctgtatatattcaaacaaccatttatgagaccagtacaaactactcaagaggaagatggctgtagctgccgatttccagaagaagaagaaggaggatgtgaactgagagtgaagttcagcaggagcgcagacgcccccgcgtaccagcagggccagaaccagctctataacgagctcaatctaggacgaagagaggagtacgatgttttggacaagagacgtggccgggaccctgagatggggggaaagccgagaaggaagaaccctcaggaaggcctgtacaatgaactgcagaaagataagatggcggaggcctacagtgagattgggatgaaaggcgagcgccggaggggcaaggggcacgatggcctttaccagggtctcagtacagccaccaaggacacctacgacgcccttcacatgcaggccctgccccctcgcggctctggcgagggaaggggttccctgcttacttgcggcgacgtcgaagagaatcccggtccgatggccctcccagtaactgccctccttttgcccctcgcactccttcttcatgccgctcgccccaactgggtcaacgtgattagcgatttgaagaaaatcgaggaccttatacagtctatgcatattgacgctacactgtatactgagagtgatgtacacccgtcctgtaaggtaacggccatgaaatgctttcttctggagctccaggtcatcagcttggagtctggggacgcaagcatccacgatacggttgaaaacctcatcatccttgcgaacaactctctctcatctaatggaaacgttacagagagtgggtgtaaggagtgcgaagagttggaagaaaaaaacatcaaagaatttcttcaatccttcgttcacatagtgcaaatgttcattaacacgtccactaccacacccgccccgaggccacctacgccggcaccgactatcgccagtcaacccctctctctgcgccccgaggcttgccggcctgcggctggtggggcggtccacacccggggcctggattttgcgtgcgatatatacatctgggcacctcttgccggcacctgcggagtgctgcttctctcactcgttattacgctgtactgc

SEQ ID NO: 3772 - DNA, 2187 bp, synthetic construct
  misc_feature 1..2187: note = Synthetic
  source 1..2187: mol_type = other DNA
atggccttaccagtgaccgccttgctcctgccgctggccttgctgctccacgccgccaggccggaggtgcagctgttggagtctgggggaggcttggtacagcctggggggtccctgagactctcctgtgcagcctctggatccctactgagcatttatgatatgggctggtttcgccaggctccagggaaggagcgagagttcgtctcagcccgtattggcaaaggtggtagtacatactatgcagactccgtgaagggccggttcaccatctccagagataattccaagaacacgctgtatctgcaaatgaacagcctgaaaccggaggacacggccgtatattactgtgcggttctggttggtgagggtgaatcttacggctatcactactggggccaagggacccaggtcaccgtctcctcaggtggaggcggttcaggcggaggtggctctggcggtggcggatcggaggtgcagctgttggagtctgggggaggcttggtacagcctggggggtccctgagactctcctgtgcagcctctggatccctactgagcatttatgatatgggctggtttcgccaggctccagggaaggagcgagagttcgtctcagcccgtattggcaaaggtggtagtacatactatgcagactccgtgaagggccggttcaccatctccagagataattccaagaacacgctgtatctgcaaatgaacagcctgaaaccggaggacacggccgtatattactgtgcggttctggttggtgagggtgaatcttacggctatcactactggggccaagggacccaggtcaccgtctcctcagcggccgcaaccacgacgccagcgccgcggccaccaacaccggcgcccaccatcgcgtcgcagcccctgtccctgcgcccagaggcgtgccggccagcggcggggggcgcagtgcacacgagggggctggacttcgcctgtgatatctacatctgggcgcccttggccgggacttgtggggtccttctcctgtcactggttatcaccctttactgcaaacggggcagaaagaaactcctgtatatattcaaacaaccatttatgagaccagtacaaactactcaagaggaagatggctgtagctgccgatttccagaagaagaagaaggaggatgtgaactgagagtgaagttcagcaggagcgcagacgcccccgcgtaccagcagggccagaaccagctctataacgagctcaatctaggacgaagagaggagtacgatgttttggacaagagacgtggccgggaccctgagatggggggaaagccgagaaggaagaaccctcaggaaggcctgtacaatgaactgcagaaagataagatggcggaggcctacagtgagattgggatgaaaggcgagcgccggaggggcaaggggcacgatggcctttaccagggtctcagtacagccaccaaggacacctacgacgcccttcacatgcaggccctgccccctcgcggctctggcgagggaaggggttccctgcttacttgcggcgacgtcgaagagaatcccggtccgatggccctcccagtaactgccctccttttgcccctcgcactccttcttcatgccgctcgccccaactgggtcaacgtgattagcgatttgaagaaaatcgaggaccttatacagtctatgcatattgacgctacactgtatactgagagtgatgtacacccgtcctgtaaggtaacggccatgaaatgctttcttctggagctccaggtcatcagcttggagtctggggacgcaagcatccacgatacggttgaaaacctcatcatccttgcgaacaactctctctcatctaatggaaacgttacagagagtgggtgtaaggagtgcgaagagttggaagaaaaaaacatcaaagaatttcttcaatccttcgttcacatagtgcaaatgttcattaacacgtccactaccacacccgccccgaggccacctacgccggcaccgactatcgccagtcaacccctctctctgcgccccgaggcttgccggcctgcggctggtggggcggtccacacccggggcctggattttgcgtgcgatatatacatctgggcacctcttgccggcacctgcggagtgctgcttctctcactcgttattacgctgtactgc

SEQ ID NO: 3773 - DNA, 2199 bp, synthetic construct
  misc_feature 1..2199: note = Synthetic
  source 1..2199: mol_type = other DNA
atggccttaccagtgaccgccttgctcctgccgctggccttgctgctccacgccgccaggccggaggtgcagctgttggagtctgggggaggcttggtacagcctggggggtccctgagactctcctgtgcagcctctggaattggcctgagcatatatttcatgggatggtttcgccaggctccagggaaggagcgcgagtttgtctcagctattattagttctagtggtagcacatactacgcagactccgtgaagggccggttcaccatctccagagacaattccaagaacacgctgtatctgcaaatgaacagcctgaagccagaggacacggccgtatattactgtgcggctcgaaccggctactctgaatacgagcaggaagactatggctactggggccaagggacccaagtcaccgtctcctcaggtggaggcggttcaggcggaggtggctctggcggtggcggatcggaggtgcagctgttggagtctgggggaggcttggtacagcctggggggtccctgagactctcctgtgcagcctctggaattggcctgagcatatatttcatgggatggtttcgccaggctccagggaaggagcgcgagtttgtctcagctattattagttctagtggtagcacatactacgcagactccgtgaagggccggttcaccatctccagagacaattccaagaacacgctgtatctgcaaatgaacagcctgaagccagaggacacggccgtatattactgtgcggctcgaaccggctactctgaatacgagcaggaagactatggctactggggccaagggacccaagtcaccgtctcctcagcggccgcaaccacgacgccagcgccgcggccaccaacaccggcgcccaccatcgcgtcgcagcccctgtccctgcgcccagaggcgtgccggccagcggcggggggcgcagtgcacacgagggggctggacttcgcctgtgatatctacatctgggcgcccttggccgggacttgtggggtccttctcctgtcactggttatcaccctttactgcaaacggggcagaaagaaactcctgtatatattcaaacaaccatttatgagaccagtacaaactactcaagaggaagatggctgtagctgccgatttccagaagaagaagaaggaggatgtgaactgagagtgaagttcagcaggagcgcagacgcccccgcgtaccagcagggccagaaccagctctataacgagctcaatctaggacgaagagaggagtacgatgttttggacaagagacgtggccgggaccctgagatggggggaaagccgagaaggaagaaccctcaggaaggcctgtacaatgaactgcagaaagataagatggcggaggcctacagtgagattgggatgaaaggcgagcgccggaggggcaaggggcacgatggcctttaccagggtctcagtacagccaccaaggacacctacgacgcccttcacatgcaggccctgccccctcgcggctctggcgagggaaggggttccctgcttacttgcggcgacgtcgaagagaatcccggtccgatggccctcccagtaactgccctccttttgcccctcgcactccttcttcatgccgctcgccccaactgggtcaacgtgattagcgatttgaagaaaatcgaggaccttatacagtctatgcatattgacgctacactgtatactgagagtgatgtacacccgtcctgtaaggtaacggccatgaaatgctttcttctggagctccaggtcatcagcttggagtctggggacgcaagcatccacgatacggttgaaaacctcatcatccttgcgaacaactctctctcatctaatggaaacgttacagagagtgggtgtaaggagtgcgaagagttggaagaaaaaaacatcaaagaatttcttcaatccttcgttcacatagtgcaaatgttcattaacacgtccactaccacacccgccccgaggccacctacgccggcaccgactatcgccagtcaacccctctctctgcgccccgaggcttgccggcctgcggctggtggggcggtccacacccggggcctggattttgcgtgcgatatatacatctgggcacctcttgccggcacctgcggagtgctgcttctctcactcgttattacgctgtactgc

SEQ ID NO: 3774 - DNA, 2193 bp, synthetic construct
  misc_feature 1..2193: note = Synthetic
  source 1..2193: mol_type = other DNA
atggccttaccagtgaccgccttgctcctgccgctggccttgctgctccacgccgccaggccggaggtgcagctgttggagtctgggggaggcttggtacagcctggggggtccctgagactctcctgtgcagcctctggaagcatttttagcagctccttcatcggatggttccgccaggctccagggaaggagcgggagtttgtctcagctgtcattgctagcagtggtagtacatactatgcagactccgtgaagggccggttcaccatctccagagacaattccaagaacacgctgtatctgcaaatgaacagcctgaaaccagaggacacggccgtatattactgtgcgggccggttcgggcaggggggggggaccgtggaatatggctactggggccaagggacccaagtcaccgtctcctcaggtggaggcggttcaggcggaggtggctctggcggtggcggatcggaggtgcagctgttggagtctgggggaggcttggtacagcctggggggtccctgagactctcctgtgcagcctctggaagcatttttagcagctccttcatcggatggttccgccaggctccagggaaggagcgggagtttgtctcagctgtcattgctagcagtggtagtacatactatgcagactccgtgaagggccggttcaccatctccagagacaattccaagaacacgctgtatctgcaaatgaacagcctgaaaccagaggacacggccgtatattactgtgcgggccggttcgggcaggggggggggaccgtggaatatggctactggggccaagggacccaagtcaccgtctcctcagcggccgcaaccacgacgccagcgccgcggccaccaacaccggcgcccaccatcgcgtcgcagcccctgtccctgcgcccagaggcgtgccggccagcggcggggggcgcagtgcacacgagggggctggacttcgcctgtgatatctacatctgggcgcccttggccgggacttgtggggtccttctcctgtcactggttatcaccctttactgcaaacggggcagaaagaaactcctgtatatattcaaacaaccatttatgagaccagtacaaactactcaagaggaagatggctgtagctgccgatttccagaagaagaagaaggaggatgtgaactgagagtgaagttcagcaggagcgcagacgcccccgcgtaccagcagggccagaaccagctctataacgagctcaatctaggacgaagagaggagtacgatgttttggacaagagacgtggccgggaccctgagatggggggaaagccgagaaggaagaaccctcaggaaggcctgtacaatgaactgcagaaagataagatggcggaggcctacagtgagattgggatgaaaggcgagcgccggaggggcaaggggcacgatggcctttaccagggtctcagtacagccaccaaggacacctacgacgcccttcacatgcaggccctgccccctcgcggctctggcgagggaaggggttccctgcttacttgcggcgacgtcgaagagaatcccggtccgatggccctcccagtaactgccctccttttgcccctcgcactccttcttcatgccgctcgccccaactgggtcaacgtgattagcgatttgaagaaaatcgaggaccttatacagtctatgcatattgacgctacactgtatactgagagtgatgtacacccgtcctgtaaggtaacggccatgaaatgctttcttctggagctccaggtcatcagcttggagtctggggacgcaagcatccacgatacggttgaaaacctcatcatccttgcgaacaactctctctcatctaatggaaacgttacagagagtgggtgtaaggagtgcgaagagttggaagaaaaaaacatcaaagaatttcttcaatccttcgttcacatagtgcaaatgttcattaacacgtccactaccacacccgccccgaggccacctacgccggcaccgactatcgccagtcaacccctctctctgcgccccgaggcttgccggcctgcggctggtggggcggtccacacccggggcctggattttgcgtgcgatatatacatctgggcacctcttgccggcacctgcggagtgctgcttctctcactcgttattacgctgtactgc

SEQ ID NO: 3775 - DNA, 2193 bp, synthetic construct
  misc_feature 1..2193: note = Synthetic
  source 1..2193: mol_type = other DNA
atggccttaccagtgaccgccttgctcctgccgctggccttgctgctccacgccgccaggccggaggtgcagctgttggagtctgggggaggcttggtacagcctggggggtccctgagactctcctgtgcagcctctggacgagtgtttagcttctattttatggggtggttccgccaggctccagggaaggaaagggagttcgtcagtggcgttattggcaaaaccggtagtacatactatactgactccgtgaagggccggttcaccatctccagagataattccaagaacacgctgtatctgcaaatgaacagcctgaaacccgaggacacggccgtatattactgtgcggccagtgaataccaaggtaccgggtacggagaatttgcatactggggccaagggacccaggtcaccgtctcctcaggtggaggcggttcaggcggaggtggctctggcggtggcggatcggaggtgcagctgttggagtctgggggaggcttggtacagcctggggggtccctgagactctcctgtgcagcctctggacgagtgtttagcttctattttatggggtggttccgccaggctccagggaaggaaagggagttcgtcagtggcgttattggcaaaaccggtagtacatactatactgactccgtgaagggccggttcaccatctccagagataattccaagaacacgctgtatctgcaaatgaacagcctgaaacccgaggacacggccgtatattactgtgcggccagtgaataccaaggtaccgggtacggagaatttgcatactggggccaagggacccaggtcaccgtctcctcagcggccgcaaccacgacgccagcgccgcggccaccaacaccggcgcccaccatcgcgtcgcagcccctgtccctgcgcccagaggcgtgccggccagcggcggggggcgcagtgcacacgagggggctggacttcgcctgtgatatctacatctgggcgcccttggccgggacttgtggggtccttctcctgtcactggttatcaccctttactgcaaacggggcagaaagaaactcctgtatatattcaaacaaccatttatgagaccagtacaaactactcaagaggaagatggctgtagctgccgatttccagaagaagaagaaggaggatgtgaactgagagtgaagttcagcaggagcgcagacgcccccgcgtaccagcagggccagaaccagctctataacgagctcaatctaggacgaagagaggagtacgatgttttggacaagagacgtggccgggaccctgagatggggggaaagccgagaaggaagaaccctcaggaaggcctgtacaatgaactgcagaaagataagatggcggaggcctacagtgagattgggatgaaaggcgagcgccggaggggcaaggggcacgatggcctttaccagggtctcagtacagccaccaaggacacctacgacgcccttcacatgcaggccctgccccctcgcggctctggcgagggaaggggttccctgcttacttgcggcgacgtcgaagagaatcccggtccgatggccctcccagtaactgccctccttttgcccctcgcactccttcttcatgccgctcgccccaactgggtcaacgtgattagcgatttgaagaaaatcgaggaccttatacagtctatgcatattgacgctacactgtatactgagagtgatgtacacccgtcctgtaaggtaacggccatgaaatgctttcttctggagctccaggtcatcagcttggagtctggggacgcaagcatccacgatacggttgaaaacctcatcatccttgcgaacaactctctctcatctaatggaaacgttacagagagtgggtgtaaggagtgcgaagagttggaagaaaaaaacatcaaagaatttcttcaatccttcgttcacatagtgcaaatgttcattaacacgtccactaccacacccgccccgaggccacctacgccggcaccgactatcgccagtcaacccctctctctgcgccccgaggcttgccggcctgcggctggtggggcggtccacacccggggcctggattttgcgtgcgatatatacatctgggcacctcttgccggcacctgcggagtgctgcttctctcactcgttattacgctgtactgc

SEQ ID NO: 3776 - DNA, 2157 bp, synthetic construct
  misc_feature 1..2157: note = Synthetic
  source 1..2157: mol_type = other DNA
atggccttaccagtgaccgccttgctcctgccgctggccttgctgctccacgccgccaggccggaggtgcagctgttggagtctgggggaggcttggtacagcctggggggtccctgagactctcctgtgcagcctctggaagtttgtttgaagtcgaacacatcggatggttccgccaggctccagggaaggagagggagtttgtctcagctcaagtgaccggtggcggttatacatactacgcagactccgtgaagggccggttcaccatctccagagacaattccaagaacacgctgtatctgcaaatgaacagcctgaaaccggaggacacggccgtatattactgttacgtccggcttgtggaggaagcctactggggccaagggacccaagtcaccgtctcctcaggtggaggcggttcaggcggaggtggctctggcggtggcggatcggaggtgcagctgttggagtctgggggaggcttggtacagcctggggggtccctgagactctcctgtgcagcctctggaagtttgtttgaagtcgaacacatcggatggttccgccaggctccagggaaggagagggagtttgtctcagctcaagtgaccggtggcggttatacatactacgcagactccgtgaagggccggttcaccatctccagagacaattccaagaacacgctgtatctgcaaatgaacagcctgaaaccggaggacacggccgtatattactgttacgtccggcttgtggaggaagcctactggggccaagggacccaagtcaccgtctcctcagcggccgcaaccacgacgccagcgccgcggccaccaacaccggcgcccaccatcgcgtcgcagcccctgtccctgcgcccagaggcgtgccggccagcggcggggggcgcagtgcacacgagggggctggacttcgcctgtgatatctacatctgggcgcccttggccgggacttgtggggtccttctcctgtcactggttatcaccctttactgcaaacggggcagaaagaaactcctgtatatattcaaacaaccatttatgagaccagtacaaactactcaagaggaagatggctgtagctgccgatttccagaagaagaagaaggaggatgtgaactgagagtgaagttcagcaggagcgcagacgcccccgcgtaccagcagggccagaaccagctctataacgagctcaatctaggacgaagagaggagtacgatgttttggacaagagacgtggccgggaccctgagatggggggaaagccgagaaggaagaaccctcaggaaggcctgtacaatgaactgcagaaagataagatggcggaggcctacagtgagattgggatgaaaggcgagcgccggaggggcaaggggcacgatggcctttaccagggtctcagtacagccaccaaggacacctacgacgcccttcacatgcaggccctgccccctcgcggctctggcgagggaaggggttccctgcttacttgcggcgacgtcgaagagaatcccggtccgatggccctcccagtaactgccctccttttgcccctcgcactccttcttcatgccgctcgccccaactgggtcaacgtgattagcgatttgaagaaaatcgaggaccttatacagtctatgcatattgacgctacactgtatactgagagtgatgtacacccgtcctgtaaggtaacggccatgaaatgctttcttctggagctccaggtcatcagcttggagtctggggacgcaagcatccacgatacggttgaaaacctcatcatccttgcgaacaactctctctcatctaatggaaacgttacagagagtgggtgtaaggagtgcgaagagttggaagaaaaaaacatcaaagaatttcttcaatccttcgttcacatagtgcaaatgttcattaacacgtccactaccacacccgccccgaggccacctacgccggcaccgactatcgccagtcaacccctctctctgcgccccgaggcttgccggcctgcggctggtggggcggtccacacccggggcctggattttgcgtgcgatatatacatctgggcacctcttgccggcacctgcggagtgctgcttctctcactcgttattacgctgtactgc

SEQ ID NO: 3777 - DNA, 2205 bp, synthetic construct
  misc_feature 1..2205: note = Synthetic
  source 1..2205: mol_type = other DNA
atggccttaccagtgaccgccttgctcctgccgctggccttgctgctccacgccgccaggccggaggtgcagctgttggagtctgggggaggcttggtacagcctggggggtccctgagactctcctgtgcagcctctggacggatttttggagagtattttatcggatggttccgccaggctccagggaaggagcgggagttcgtctcagctattatcaccggcagtggtattacacactacgcagactccgtgaagggccggttcaccatctccagagacaattccaagaacacgctgtatctgcaaatgaacagcctgaaaccggaggacacggccgtatattactgtgcggcgcgcacagactacactacaggccaggaactaccagaatacgggtactggggccaagggacccaggtcaccgtctcctcaggtggaggcggttcaggcggaggtggctctggcggtggcggatcggaggtgcagctgttggagtctgggggaggcttggtacagcctggggggtccctgagactctcctgtgcagcctctggacggatttttggagagtattttatcggatggttccgccaggctccagggaaggagcgggagttcgtctcagctattatcaccggcagtggtattacacactacgcagactccgtgaagggccggttcaccatctccagagacaattccaagaacacgctgtatctgcaaatgaacagcctgaaaccggaggacacggccgtatattactgtgcggcgcgcacagactacactacaggccaggaactaccagaatacgggtactggggccaagggacccaggtcaccgtctcctcagcggccgcaaccacgacgccagcgccgcggccaccaacaccggcgcccaccatcgcgtcgcagcccctgtccctgcgcccagaggcgtgccggccagcggcggggggcgcagtgcacacgagggggctggacttcgcctgtgatatctacatctgggcgcccttggccgggacttgtggggtccttctcctgtcactggttatcaccctttactgcaaacggggcagaaagaaactcctgtatatattcaaacaaccatttatgagaccagtacaaactactcaagaggaagatggctgtagctgccgatttccagaagaagaagaaggaggatgtgaactgagagtgaagttcagcaggagcgcagacgcccccgcgtaccagcagggccagaaccagctctataacgagctcaatctaggacgaagagaggagtacgatgttttggacaagagacgtggccgggaccctgagatggggggaaagccgagaaggaagaaccctcaggaaggcctgtacaatgaactgcagaaagataagatggcggaggcctacagtgagattgggatgaaaggcgagcgccggaggggcaaggggcacgatggcctttaccagggtctcagtacagccaccaaggacacctacgacgcccttcacatgcaggccctgccccctcgcggctctggcgagggaaggggttccctgcttacttgcggcgacgtcgaagagaatcccggtccgatggccctcccagtaactgccctccttttgcccctcgcactccttcttcatgccgctcgccccaactgggtcaacgtgattagcgatttgaagaaaatcgaggaccttatacagtctatgcatattgacgctacactgtatactgagagtgatgtacacccgtcctgtaaggtaacggccatgaaatgctttcttctggagctccaggtcatcagcttggagtctggggacgcaagcatccacgatacggttgaaaacctcatcatccttgcgaacaactctctctcatctaatggaaacgttacagagagtgggtgtaaggagtgcgaagagttggaagaaaaaaacatcaaagaatttcttcaatccttcgttcacatagtgcaaatgttcattaacacgtccactaccacacccgccccgaggccacctacgccggcaccgactatcgccagtcaacccctctctctgcgccccgaggcttgccggcctgcggctggtggggcggtccacacccggggcctggattttgcgtgcgatatatacatctgggcacctcttgccggcacctgcggagtgctgcttctctcactcgttattacgctgtactgc

SEQ ID NO: 3778 - DNA, 2175 bp, synthetic construct
  misc_feature 1..2175: note = Synthetic
  source 1..2175: mol_type = other DNA
atggccttaccagtgaccgccttgctcctgccgctggccttgctgctccacgccgccaggccggaggtgcagctgttggagtctgggggaggcttggtacagcctggggggtccctgagactctcctgtgcagcctctggatcaattgagagcatttatttcatcgggtggtttcgccaggctccagggaaggagagagagtttgtctcagctgaattcatcccaggaggtagcacagtgtactcagactccgtgaagggccggttcaccatctccagagacaattccaagaacacgctgtatctgcaaatgaacagcctgaaacccgaggacacggccgtatattactgtaacgccggcctagacgaagggcggtactacacctactggggccaagggacccaggtcaccgtctcctcaggtggaggcggttcaggcggaggtggctctggcggtggcggatcggaggtgcagctgttggagtctgggggaggcttggtacagcctggggggtccctgagactctcctgtgcagcctctggatcaattgagagcatttatttcatcgggtggtttcgccaggctccagggaaggagagagagtttgtctcagctgaattcatcccaggaggtagcacagtgtactcagactccgtgaagggccggttcaccatctccagagacaattccaagaacacgctgtatctgcaaatgaacagcctgaaacccgaggacacggccgtatattactgtaacgccggcctagacgaagggcggtactacacctactggggccaagggacccaggtcaccgtctcctcagcggccgcaaccacgacgccagcgccgcggccaccaacaccggcgcccaccatcgcgtcgcagcccctgtccctgcgcccagaggcgtgccggccagcggcggggggcgcagtgcacacgagggggctggacttcgcctgtgatatctacatctgggcgcccttggccgggacttgtggggtccttctcctgtcactggttatcaccctttactgcaaacggggcagaaagaaactcctgtatatattcaaacaaccatttatgagaccagtacaaactactcaagaggaagatggctgtagctgccgatttccagaagaagaagaaggaggatgtgaactgagagtgaagttcagcaggagcgcagacgcccccgcgtaccagcagggccagaaccagctctataacgagctcaatctaggacgaagagaggagtacgatgttttggacaagagacgtggccgggaccctgagatggggggaaagccgagaaggaagaaccctcaggaaggcctgtacaatgaactgcagaaagataagatggcggaggcctacagtgagattgggatgaaaggcgagcgccggaggggcaaggggcacgatggcctttaccagggtctcagtacagccaccaaggacacctacgacgcccttcacatgcaggccctgccccctcgcggctctggcgagggaaggggttccctgcttacttgcggcgacgtcgaagagaatcccggtccgatggccctcccagtaactgccctccttttgcccctcgcactccttcttcatgccgctcgccccaactgggtcaacgtgattagcgatttgaagaaaatcgaggaccttatacagtctatgcatattgacgctacactgtatactgagagtgatgtacacccgtcctgtaaggtaacggccatgaaatgctttcttctggagctccaggtcatcagcttggagtctggggacgcaagcatccacgatacggttgaaaacctcatcatccttgcgaacaactctctctcatctaatggaaacgttacagagagtgggtgtaaggagtgcgaagagttggaagaaaaaaacatcaaagaatttcttcaatccttcgttcacatagtgcaaatgttcattaacacgtccactaccacacccgccccgaggccacctacgccggcaccgactatcgccagtcaacccctctctctgcgccccgaggcttgccggcctgcggctggtggggcggtccacacccggggcctggattttgcgtgcgatatatacatctgggcacctcttgccggcacctgcggagtgctgcttctctcactcgttattacgctgtactgc

SEQ ID NO: 3779 - DNA, 2157 bp, synthetic construct
  misc_feature 1..2157: note = Synthetic
  source 1..2157: mol_type = other DNA
atggccttaccagtgaccgccttgctcctgccgctggccttgctgctccacgccgccaggccggaggtgcagctgttggagtctgggggaggcttggtacagcctggggggtccctgagactctcctgtgcagcctctggaatagaggtcagcagcagtgtagtgggttggtttcgccaggctccagggaaggagcgggagtttgtctcagctagcggtgtgggaggtagcacatactacgcagactccgtgaagggccggttcaccatctccagagacaattccaagaacacgctgtatctgcaaatgaacagcctgaagcctgaggacacggccgtatattactgttatgcagtgtacttgaccatctacacctactggggccaagggacccaggtcaccgtctcctcaggtggaggcggttcaggcggaggtggctctggcggtggcggatcggaggtgcagctgttggagtctgggggaggcttggtacagcctggggggtccctgagactctcctgtgcagcctctggaatagaggtcagcagcagtgtagtgggttggtttcgccaggctccagggaaggagcgggagtttgtctcagctagcggtgtgggaggtagcacatactacgcagactccgtgaagggccggttcaccatctccagagacaattccaagaacacgctgtatctgcaaatgaacagcctgaagcctgaggacacggccgtatattactgttatgcagtgtacttgaccatctacacctactggggccaagggacccaggtcaccgtctcctcagcggccgcaaccacgacgccagcgccgcggccaccaacaccggcgcccaccatcgcgtcgcagcccctgtccctgcgcccagaggcgtgccggccagcggcggggggcgcagtgcacacgagggggctggacttcgcctgtgatatctacatctgggcgcccttggccgggacttgtggggtccttctcctgtcactggttatcaccctttactgcaaacggggcagaaagaaactcctgtatatattcaaacaaccatttatgagaccagtacaaactactcaagaggaagatggctgtagctgccgatttccagaagaagaagaaggaggatgtgaactgagagtgaagttcagcaggagcgcagacgcccccgcgtaccagcagggccagaaccagctctataacgagctcaatctaggacgaagagaggagtacgatgttttggacaagagacgtggccgggaccctgagatggggggaaagccgagaaggaagaaccctcaggaaggcctgtacaatgaactgcagaaagataagatggcggaggcctacagtgagattgggatgaaaggcgagcgccggaggggcaaggggcacgatggcctttaccagggtctcagtacagccaccaaggacacctacgacgcccttcacatgcaggccctgccccctcgcggctctggcgagggaaggggttccctgcttacttgcggcgacgtcgaagagaatcccggtccgatggccctcccagtaactgccctccttttgcccctcgcactccttcttcatgccgctcgccccaactgggtcaacgtgattagcgatttgaagaaaatcgaggaccttatacagtctatgcatattgacgctacactgtatactgagagtgatgtacacccgtcctgtaaggtaacggccatgaaatgctttcttctggagctccaggtcatcagcttggagtctggggacgcaagcatccacgatacggttgaaaacctcatcatccttgcgaacaactctctctcatctaatggaaacgttacagagagtgggtgtaaggagtgcgaagagttggaagaaaaaaacatcaaagaatttcttcaatccttcgttcacatagtgcaaatgttcattaacacgtccactaccacacccgccccgaggccacctacgccggcaccgactatcgccagtcaacccctctctctgcgccccgaggcttgccggcctgcggctggtggggcggtccacacccggggcctggattttgcgtgcgatatatacatctgggcacctcttgccggcacctgcggagtgctgcttctctcactcgttattacgctgtactgc

SEQ ID NO: 3780 - DNA, 2163 bp, synthetic construct
  misc_feature 1..2163: note = Synthetic
  source 1..2163: mol_type = other DNA
atggccttaccagtgaccgccttgctcctgccgctggccttgctgctccacgccgccaggccggaggtgcagctgttggagtctgggggaggcttggtacagcctggggggtccctgagactctcctgtgcagcctctggattcaccatcagcagatatgccatggcatggtttcgccaggctccagggaaggaacgcgagttcgtcagtgggagcattttcgttggtggtggcacatactatagggactccgtgaagggccggttcaccatctccagagataattccaagaacacgctgtatctgcaaatgaacagcctgaaacctgaggacacggccgtatattactgttatgccaccgtgggtgactcctattattactggggccaagggacccaggtcaccgtctcctcaggtggaggcggttcaggcggaggtggctctggcggtggcggatcggaggtgcagctgttggagtctgggggaggcttggtacagcctggggggtccctgagactctcctgtgcagcctctggattcaccatcagcagatatgccatggcatggtttcgccaggctccagggaaggaacgcgagttcgtcagtgggagcattttcgttggtggtggcacatactatagggactccgtgaagggccggttcaccatctccagagataattccaagaacacgctgtatctgcaaatgaacagcctgaaacctgaggacacggccgtatattactgttatgccaccgtgggtgactcctattattactggggccaagggacccaggtcaccgtctcctcagcggccgcaaccacgacgccagcgccgcggccaccaacaccggcgcccaccatcgcgtcgcagcccctgtccctgcgcccagaggcgtgccggccagcggcggggggcgcagtgcacacgagggggctggacttcgcctgtgatatctacatctgggcgcccttggccgggacttgtggggtccttctcctgtcactggttatcaccctttactgcaaacggggcagaaagaaactcctgtatatattcaaacaaccatttatgagaccagtacaaactactcaagaggaagatggctgtagctgccgatttccagaagaagaagaaggaggatgtgaactgagagtgaagttcagcaggagcgcagacgcccccgcgtaccagcagggccagaaccagctctataacgagctcaatctaggacgaagagaggagtacgatgttttggacaagagacgtggccgggaccctgagatggggggaaagccgagaaggaagaaccctcaggaaggcctgtacaatgaactgcagaaagataagatggcggaggcctacagtgagattgggatgaaaggcgagcgccggaggggcaaggggcacgatggcctttaccagggtctcagtacagccaccaaggacacctacgacgcccttcacatgcaggccctgccccctcgcggctctggcgagggaaggggttccctgcttacttgcggcgacgtcgaagagaatcccggtccgatggccctcccagtaactgccctccttttgcccctcgcactccttcttcatgccgctcgccccaactgggtcaacgtgattagcgatttgaagaaaatcgaggaccttatacagtctatgcatattgacgctacactgtatactgagagtgatgtacacccgtcctgtaaggtaacggccatgaaatgctttcttctggagctccaggtcatcagcttggagtctggggacgcaagcatccacgatacggttgaaaacctcatcatccttgcgaacaactctctctcatctaatggaaacgttacagagagtgggtgtaaggagtgcgaagagttggaagaaaaaaacatcaaagaatttcttcaatccttcgttcacatagtgcaaatgttcattaacacgtccactaccacacccgccccgaggccacctacgccggcaccgactatcgccagtcaacccctctctctgcgccccgaggcttgccggcctgcggctggtggggcggtccacacccggggcctggattttgcgtgcgatatatacatctgggcacctcttgccggcacctgcggagtgctgcttctctcactcgttattacgctgtactgc

SEQ ID NO: 3781 - DNA, 2157 bp, synthetic construct
  misc_feature 1..2157: note = Synthetic
  source 1..2157: mol_type = other DNA
atggccttaccagtgaccgccttgctcctgccgctggccttgctgctccacgccgccaggccggaggtgcagctgttggagtctgggggaggcttggtacagcctggggggtccctgagactctcctgtgcagcctctggaagcctgtttagcgttgagcacatcggctggttccgccaggctccagggaaggagagagagtttgtctcagctcaggtaaccggtgggggttatacatactacgcagactccgtgaagggccggttcaccatctccagagacaattccaagaacacgctgtatctgcaaatgaacagcctgaaaccagaggacacggccgtatattactgttatgttagacttgtggaggaagcttactggggccaagggacccaggtcaccgtctcctcaggtggaggcggttcaggcggaggtggctctggcggtggcggatcggaggtgcagctgttggagtctgggggaggcttggtacagcctggggggtccctgagactctcctgtgcagcctctggaagcctgtttagcgttgagcacatcggctggttccgccaggctccagggaaggagagagagtttgtctcagctcaggtaaccggtgggggttatacatactacgcagactccgtgaagggccggttcaccatctccagagacaattccaagaacacgctgtatctgcaaatgaacagcctgaaaccagaggacacggccgtatattactgttatgttagacttgtggaggaagcttactggggccaagggacccaggtcaccgtctcctcagcggccgcaaccacgacgccagcgccgcggccaccaacaccggcgcccaccatcgcgtcgcagcccctgtccctgcgcccagaggcgtgccggccagcggcggggggcgcagtgcacacgagggggctggacttcgcctgtgatatctacatctgggcgcccttggccgggacttgtggggtccttctcctgtcactggttatcaccctttactgcaaacggggcagaaagaaactcctgtatatattcaaacaaccatttatgagaccagtacaaactactcaagaggaagatggctgtagctgccgatttccagaagaagaagaaggaggatgtgaactgagagtgaagttcagcaggagcgcagacgcccccgcgtaccagcagggccagaaccagctctataacgagctcaatctaggacgaagagaggagtacgatgttttggacaagagacgtggccgggaccctgagatggggggaaagccgagaaggaagaaccctcaggaaggcctgtacaatgaactgcagaaagataagatggcggaggcctacagtgagattgggatgaaaggcgagcgccggaggggcaaggggcacgatggcctttaccagggtctcagtacagccaccaaggacacctacgacgcccttcacatgcaggccctgccccctcgcggctctggcgagggaaggggttccctgcttacttgcggcgacgtcgaagagaatcccggtccgatggccctcccagtaactgccctccttttgcccctcgcactccttcttcatgccgctcgccccaactgggtcaacgtgattagcgatttgaagaaaatcgaggaccttatacagtctatgcatattgacgctacactgtatactgagagtgatgtacacccgtcctgtaaggtaacggccatgaaatgctttcttctggagctccaggtcatcagcttggagtctggggacgcaagcatccacgatacggttgaaaacctcatcatccttgcgaacaactctctctcatctaatggaaacgttacagagagtgggtgtaaggagtgcgaagagttggaagaaaaaaacatcaaagaatttcttcaatccttcgttcacatagtgcaaatgttcattaacacgtccactaccacacccgccccgaggccacctacgccggcaccgactatcgccagtcaacccctctctctgcgccccgaggcttgccggcctgcggctggtggggcggtccacacccggggcctggattttgcgtgcgatatatacatctgggcacctcttgccggcacctgcggagtgctgcttctctcactcgttattacgctgtactgc

SEQ ID NO: 3782 - DNA, 2163 bp, synthetic construct
  misc_feature 1..2163: note = Synthetic
  source 1..2163: mol_type = other DNA
atggccttaccagtgaccgccttgctcctgccgctggccttgctgctccacgccgccaggccggaggtgcagctgttggagtctgggggaggcttggtacagcctggggggtccctgagactctcctgtgcagcctctggattcatctttagcatttatgatatgggttggttccgccaggctccagggaaggaaagggagttcgtctcagctattagtactaccggtggaagcatttactacgcagactccgtgaagggccggttcaccatctccagagacaattccaagaacacgctgtatctgcaaatgaacagcctgaagccagaggacacggccgtatattactgtaacgccgaccctttagaaagctacgggtactggggccaagggacccaggtcaccgtctcctcaggtggaggcggttcaggcggaggtggctctggcggtggcggatcggaggtgcagctgttggagtctgggggaggcttggtacagcctggggggtccctgagactctcctgtgcagcctctggattcatctttagcatttatgatatgggttggttccgccaggctccagggaaggaaagggagttcgtctcagctattagtactaccggtggaagcatttactacgcagactccgtgaagggccggttcaccatctccagagacaattccaagaacacgctgtatctgcaaatgaacagcctgaagccagaggacacggccgtatattactgtaacgccgaccctttagaaagctacgggtactggggccaagggacccaggtcaccgtctcctcagcggccgcaaccacgacgccagcgccgcggccaccaacaccggcgcccaccatcgcgtcgcagcccctgtccctgcgcccagaggcgtgccggccagcggcggggggcgcagtgcacacgagggggctggacttcgcctgtgatatctacatctgggcgcccttggccgggacttgtggggtccttctcctgtcactggttatcaccctttactgcaaacggggcagaaagaaactcctgtatatattcaaacaaccatttatgagaccagtacaaactactcaagaggaagatggctgtagctgccgatttccagaagaagaagaaggaggatgtgaactgagagtgaagttcagcaggagcgcagacgcccccgcgtaccagcagggccagaaccagctctataacgagctcaatctaggacgaagagaggagtacgatgttttggacaagagacgtggccgggaccctgagatggggggaaagccgagaaggaagaaccctcaggaaggcctgtacaatgaactgcagaaagataagatggcggaggcctacagtgagattgggatgaaaggcgagcgccggaggggcaaggggcacgatggcctttaccagggtctcagtacagccaccaaggacacctacgacgcccttcacatgcaggccctgccccctcgcggctctggcgagggaaggggttccctgcttacttgcggcgacgtcgaagagaatcccggtccgatggccctcccagtaactgccctccttttgcccctcgcactccttcttcatgccgctcgccccaactgggtcaacgtgattagcgatttgaagaaaatcgaggaccttatacagtctatgcatattgacgctacactgtatactgagagtgatgtacacccgtcctgtaaggtaacggccatgaaatgctttcttctggagctccaggtcatcagcttggagtctggggacgcaagcatccacgatacggttgaaaacctcatcatccttgcgaacaactctctctcatctaatggaaacgttacagagagtgggtgtaaggagtgcgaagagttggaagaaaaaaacatcaaagaatttcttcaatccttcgttcacatagtgcaaatgttcattaacacgtccactaccacacccgccccgaggccacctacgccggcaccgactatcgccagtcaacccctctctctgcgccccgaggcttgccggcctgcggctggtggggcggtccacacccggggcctggattttgcgtgcgatatatacatctgggcacctcttgccggcacctgcggagtgctgcttctctcactcgttattacgctgtactgc

SEQ ID NO: 3783 - DNA, 2175 bp, synthetic construct
  misc_feature 1..2175: note = Synthetic
  source 1..2175: mol_type = other DNA
atggccttaccagtgaccgccttgctcctgccgctggccttgctgctccacgccgccaggccggaggtgcagctgttggagtctgggggaggcttggtacagcctggggggtccctgagactctcctgtgcagcctctggatccgtatttagcagctatttcattggctggttccgccaggctccagggaaggagagagagttcgtctcagcagtgattagtagcagtggtagcacatactacgcagactccgtgaagggccggttcaccatctccagagacaattccaagaacacgctgtatctgcaaatgaacagcctgaagcctgaggacacggccgtatattactgtgttgcacgggaggatgttggcgagccctacggctactggggccaagggacccaggtcaccgtctcctcaggtggaggcggttcaggcggaggtggctctggcggtggcggatcggaggtgcagctgttggagtctgggggaggcttggtacagcctggggggtccctgagactctcctgtgcagcctctggatccgtatttagcagctatttcattggctggttccgccaggctccagggaaggagagagagttcgtctcagcagtgattagtagcagtggtagcacatactacgcagactccgtgaagggccggttcaccatctccagagacaattccaagaacacgctgtatctgcaaatgaacagcctgaagcctgaggacacggccgtatattactgtgttgcacgggaggatgttggcgagccctacggctactggggccaagggacccaggtcaccgtctcctcagcggccgcaaccacgacgccagcgccgcggccaccaacaccggcgcccaccatcgcgtcgcagcccctgtccctgcgcccagaggcgtgccggccagcggcggggggcgcagtgcacacgagggggctggacttcgcctgtgatatctacatctgggcgcccttggccgggacttgtggggtccttctcctgtcactggttatcaccctttactgcaaacggggcagaaagaaactcctgtatatattcaaacaaccatttatgagaccagtacaaactactcaagaggaagatggctgtagctgccgatttccagaagaagaagaaggaggatgtgaactgagagtgaagttcagcaggagcgcagacgcccccgcgtaccagcagggccagaaccagctctataacgagctcaatctaggacgaagagaggagtacgatgttttggacaagagacgtggccgggaccctgagatggggggaaagccgagaaggaagaaccctcaggaaggcctgtacaatgaactgcagaaagataagatggcggaggcctacagtgagattgggatgaaaggcgagcgccggaggggcaaggggcacgatggcctttaccagggtctcagtacagccaccaaggacacctacgacgcccttcacatgcaggccctgccccctcgcggctctggcgagggaaggggttccctgcttacttgcggcgacgtcgaagagaatcccggtccgatggccctcccagtaactgccctccttttgcccctcgcactccttcttcatgccgctcgccccaactgggtcaacgtgattagcgatttgaagaaaatcgaggaccttatacagtctatgcatattgacgctacactgtatactgagagtgatgtacacccgtcctgtaaggtaacggccatgaaatgctttcttctggagctccaggtcatcagcttggagtctggggacgcaagcatccacgatacggttgaaaacctcatcatccttgcgaacaactctctctcatctaatggaaacgttacagagagtgggtgtaaggagtgcgaagagttggaagaaaaaaacatcaaagaatttcttcaatccttcgttcacatagtgcaaatgttcattaacacgtccactaccacacccgccccgaggccacctacgccggcaccgactatcgccagtcaacccctctctctgcgccccgaggcttgccggcctgcggctggtggggcggtccacacccggggcctggattttgcgtgcgatatatacatctgggcacctcttgccggcacctgcggagtgctgcttctctcactcgttattacgctgtactgc

SEQ ID NO: 3784 - DNA, 2181 bp, synthetic construct
  misc_feature 1..2181: note = Synthetic
  source 1..2181: mol_type = other DNA
atggccttaccagtgaccgccttgctcctgccgctggccttgctgctccacgccgccaggccggaggtgcagctgctggaaagcggcggcggactggtgcaacctggaggatctctgagactgagctgcgctgcttctggccggggctttaccagctactacatgggctggttcagacaggcccctggcaaggaacgggaattcgtgtccgccgtgatcttcccagagggctaccggtactacgccgacagcgtgaaaggcagattcaccatcagcagagataatagcaagaacaccctgtacctgcagatgaacagcctcaagcccgaggacacagccgtctactattgtgccaagtacacaggcttcggcgaggacgcctacagatactggggccagggcacccaggtgaccgtgtccagcggtggcggtggctcgggcggtggtgggtcgggtggcggcggatctgaggtgcagctgctggagagcggaggtggtctggtgcagccggggggctccttgcgcctgtcatgcgctgcttccgggcgaggttttaccagctactacatgggctggttccgccaggcccccggcaaggagcgcgagttcgtcagcgcagtgatttttcccgagggctacaggtattacgcggacagtgtgaaaggccgcttcaccatctcgcgggacaactccaagaacacgctttacctgcagatgaattccctcaagcctgaagatacagccgtgtactactgtgccaagtacaccggcttcggagaggacgcgtaccgttattggggccaaggcacccaggtcactgtttcttctgcggccgcaaccacgacgccagcgccgcggccaccaacaccggcgcccaccatcgcgtcgcagcccctgtccctgcgcccagaggcgtgccggccagcggcggggggcgcagtgcacacgagggggctggacttcgcctgtgatatctacatctgggcgcccttggccgggacttgtggggtccttctcctgtcactggttatcaccctttactgcaaacggggcagaaagaaactcctgtatatattcaaacaaccatttatgagaccagtacaaactactcaagaggaagatggctgtagctgccgatttccagaagaagaagaaggaggatgtgaactgagagtgaagttcagcaggagcgcagacgcccccgcgtaccagcagggccagaaccagctctataacgagctcaatctaggacgaagagaggagtacgatgttttggacaagagacgtggccgggaccctgagatggggggaaagccgagaaggaagaaccctcaggaaggcctgtacaatgaactgcagaaagataagatggcggaggcctacagtgagattgggatgaaaggcgagcgccggaggggcaaggggcacgatggcctttaccagggtctcagtacagccaccaaggacacctacgacgcccttcacatgcaggccctgccccctcgcggctctggcgagggaaggggttccctgcttacttgcggcgacgtcgaagagaatcccggtccgatggccctcccagtaactgccctccttttgcccctcgcactccttcttcatgccgctcgccccaactgggtcaacgtgattagcgatttgaagaaaatcgaggaccttatacagtctatgcatattgacgctacactgtatactgagagtgatgtacacccgtcctgtaaggtaacggccatgaaatgctttcttctggagctccaggtcatcagcttggagtctggggacgcaagcatccacgatacggttgaaaacctcatcatccttgcgaacaactctctctcatctaatggaaacgttacagagagtgggtgtaaggagtgcgaagagttggaagaaaaaaacatcaaagaatttcttcaatccttcgttcacatagtgcaaatgttcattaacacgtccactaccacacccgccccgaggccacctacgccggcaccgactatcgccagtcaacccctctctctgcgccccgaggcttgccggcctgcggctggtggggcggtccacacccggggcctggattttgcgtgcgatatatacatctgggcacctcttgccggcacctgcggagtgctgcttctctcactcgttattacgctgtactgc

SEQ ID NO: 3785 - DNA, 2175 bp, synthetic construct
  misc_feature 1..2175: note = Synthetic
  source 1..2175: mol_type = other DNA
atggccttaccagtgaccgccttgctcctgccgctggccttgctgctccacgccgccaggccggaggtgcagctgctggaatctggcggaggcctggtgcaacctggaggatctctgagactgagctgtgccgcttctggcctcacattcagcatccacacagttggctggtttagacaggcccctggcaaagagcgggaattcgtgtccgccgccctgggcagcggcggacgcccatactatagagatagcgtgaagggcagattcaccatcagccgggacaatagcaagaacaccctgtacctgcagatgaacagcctgaagcccgaggacaccgccgtgtactactgctacgtggacgtgggcaccggcctgtactacggctactggggccagggcacacaggtgaccgtctccagcggtggcggtggctcgggcggtggtgggtcgggtggcggcggatctgaggtgcagctgctggagagcggaggcggtctcgtgcagccgggagggagtctacgcctgtcgtgtgccgcaagcggtctcacgttttcaattcacaccgtgggctggttccgccaggccccaggcaaggagcgcgagttcgtcagcgcggctttgggctccggtgggcgtccctattacagggattctgtgaagggccgcttcaccatctctcgggacaactccaaaaacactctgtacctgcagatgaattccctgaagcctgaagacaccgccgtgtactactgctacgtggacgtagggactggcctttactacggctattggggccaaggcacccaggtcacagtttcgtccgcggccgcaaccacgacgccagcgccgcggccaccaacaccggcgcccaccatcgcgtcgcagcccctgtccctgcgcccagaggcgtgccggccagcggcggggggcgcagtgcacacgagggggctggacttcgcctgtgatatctacatctgggcgcccttggccgggacttgtggggtccttctcctgtcactggttatcaccctttactgcaaacggggcagaaagaaactcctgtatatattcaaacaaccatttatgagaccagtacaaactactcaagaggaagatggctgtagctgccgatttccagaagaagaagaaggaggatgtgaactgagagtgaagttcagcaggagcgcagacgcccccgcgtaccagcagggccagaaccagctctataacgagctcaatctaggacgaagagaggagtacgatgttttggacaagagacgtggccgggaccctgagatggggggaaagccgagaaggaagaaccctcaggaaggcctgtacaatgaactgcagaaagataagatggcggaggcctacagtgagattgggatgaaaggcgagcgccggaggggcaaggggcacgatggcctttaccagggtctcagtacagccaccaaggacacctacgacgcccttcacatgcaggccctgccccctcgcggctctggcgagggaaggggttccctgcttacttgcggcgacgtcgaagagaatcccggtccgatggccctcccagtaactgccctccttttgcccctcgcactccttcttcatgccgctcgccccaactgggtcaacgtgattagcgatttgaagaaaatcgaggaccttatacagtctatgcatattgacgctacactgtatactgagagtgatgtacacccgtcctgtaaggtaacggccatgaaatgctttcttctggagctccaggtcatcagcttggagtctggggacgcaagcatccacgatacggttgaaaacctcatcatccttgcgaacaactctctctcatctaatggaaacgttacagagagtgggtgtaaggagtgcgaagagttggaagaaaaaaacatcaaagaatttcttcaatccttcgttcacatagtgcaaatgttcattaacacgtccactaccacacccgccccgaggccacctacgccggcaccgactatcgccagtcaacccctctctctgcgccccgaggcttgccggcctgcggctggtggggcggtccacacccggggcctggattttgcgtgcgatatatacatctgggcacctcttgccggcacctgcggagtgctgcttctctcactcgttattacgctgtactgc

SEQ ID NO: 3786 - DNA, 2193 bp, synthetic construct
  misc_feature 1..2193: note = Synthetic
  source 1..2193: mol_type = other DNA
atggccttaccagtgaccgccttgctcctgccgctggccttgctgctccacgccgccaggccggaggtgcagctgctggaaagcggcggaggcctggtccaacctggaggaagcctgagactgtcttgtgccgccagcggcagaatcttcagctcttattttatgggctggttccggcaggcccctggcaaggaaagagagttcgtgtccgcccacatcagcagcgagggctctacatactaccgggacagcgtgaaaggcaggttcaccatctccagagataatagcaagaacaccctgtacctgcagatgaacagcctcaagcccgaggacaccgccgtgtactactgcgctgctagagaatacgccgacacccagcggggcgagtacgcctactggggccagggcacacaggtgaccgtgtccagcggtggcggtggctcgggcggtggtgggtcgggtggcggcggatctgaggtgcagctgctggagagcggcggaggtttggtgcagccggggggttctcttcgcctgagttgcgccgctagcggacgcattttttcaagctatttcatgggctggttccgccaggcccccggcaaggagcgagagttcgtcagcgcgcacatctcttccgagggctccacctactacagggattctgtgaagggccgcttcaccatctcgcgggacaactccaagaacacgctgtacctgcagatgaattccctcaaacctgaagacactgccgtgtactactgtgccgctcgcgagtacgcggacacccaacgtggggagtacgcatattggggccagggcacccaggtcacagtttcgtccgcggccgcaaccacgacgccagcgccgcggccaccaacaccggcgcccaccatcgcgtcgcagcccctgtccctgcgcccagaggcgtgccggccagcggcggggggcgcagtgcacacgagggggctggacttcgcctgtgatatctacatctgggcgcccttggccgggacttgtggggtccttctcctgtcactggttatcaccctttactgcaaacggggcagaaagaaactcctgtatatattcaaacaaccatttatgagaccagtacaaactactcaagaggaagatggctgtagctgccgatttccagaagaagaagaaggaggatgtgaactgagagtgaagttcagcaggagcgcagacgcccccgcgtaccagcagggccagaaccagctctataacgagctcaatctaggacgaagagaggagtacgatgttttggacaagagacgtggccgggaccctgagatggggggaaagccgagaaggaagaaccctcaggaaggcctgtacaatgaactgcagaaagataagatggcggaggcctacagtgagattgggatgaaaggcgagcgccggaggggcaaggggcacgatggcctttaccagggtctcagtacagccaccaaggacacctacgacgcccttcacatgcaggccctgccccctcgcggctctggcgagggaaggggttccctgcttacttgcggcgacgtcgaagagaatcccggtccgatggccctcccagtaactgccctccttttgcccctcgcactccttcttcatgccgctcgccccaactgggtcaacgtgattagcgatttgaagaaaatcgaggaccttatacagtctatgcatattgacgctacactgtatactgagagtgatgtacacccgtcctgtaaggtaacggccatgaaatgctttcttctggagctccaggtcatcagcttggagtctggggacgcaagcatccacgatacggttgaaaacctcatcatccttgcgaacaactctctctcatctaatggaaacgttacagagagtgggtgtaaggagtgcgaagagttggaagaaaaaaacatcaaagaatttcttcaatccttcgttcacatagtgcaaatgttcattaacacgtccactaccacacccgccccgaggccacctacgccggcaccgactatcgccagtcaacccctctctctgcgccccgaggcttgccggcctgcggctggtggggcggtccacacccggggcctggattttgcgtgcgatatatacatctgggcacctcttgccggcacctgcggagtgctgcttctctcactcgttattacgctgtactgc

SEQ ID NO: 3787 - DNA, 2163 bp, synthetic construct
  misc_feature 1..2163: note = Synthetic
  source 1..2163: mol_type = other DNA
atggccttaccagtgaccgccttgctcctgccgctggccttgctgctccacgccgccaggccggaggtgcagctgctggaaagcggaggcggcctggttcaacctggaggatctctgagactgagctgcgccgctagcggctctatcgtgtccagctacgccatgggctggtttagacaggcccctggcaaagagcgggaattcgtgtcctccgccatcggcaagggcggcgtcacaatctacgccgacagcgtgaagggcagattcaccatcagcagagataatagcaagaacaccctgtacctccagatgaacagcctgaagcccgaggacaccgccgtgtactattgtgctacagatgagagcacctaccgggactactggggccagggcacacaggtgaccgtgtctagcggtggcggtggctcgggcggtggtgggtcgggtggcggcggatctgaggtgcagctgctggagagcggagggggactggtgcagccgggcggctcccttcgtttgtcatgcgcagcttccggttctatcgtgtccagctacgccatgggctggttccgccaggcccccggcaaggagcgcgagttcgtctcttccgccatcggtaaaggtggggttacaatttacgcggacagcgtgaagggccgctttaccatctctcgggacaactccaagaacacgctgtacctgcagatgaattccctcaagcctgaagacaccgccgtgtactactgtgccaccgacgagagtacttacagggattattggggccaaggcacccaggtcactgtatcgtcggcggccgcaaccacgacgccagcgccgcggccaccaacaccggcgcccaccatcgcgtcgcagcccctgtccctgcgcccagaggcgtgccggccagcggcggggggcgcagtgcacacgagggggctggacttcgcctgtgatatctacatctgggcgcccttggccgggacttgtggggtccttctcctgtcactggttatcaccctttactgcaaacggggcagaaagaaactcctgtatatattcaaacaaccatttatgagaccagtacaaactactcaagaggaagatggctgtagctgccgatttccagaagaagaagaaggaggatgtgaactgagagtgaagttcagcaggagcgcagacgcccccgcgtaccagcagggccagaaccagctctataacgagctcaatctaggacgaagagaggagtacgatgttttggacaagagacgtggccgggaccctgagatggggggaaagccgagaaggaagaaccctcaggaaggcctgtacaatgaactgcagaaagataagatggcggaggcctacagtgagattgggatgaaaggcgagcgccggaggggcaaggggcacgatggcctttaccagggtctcagtacagccaccaaggacacctacgacgcccttcacatgcaggccctgccccctcgcggctctggcgagggaaggggttccctgcttacttgcggcgacgtcgaagagaatcccggtccgatggccctcccagtaactgccctccttttgcccctcgcactccttcttcatgccgctcgccccaactgggtcaacgtgattagcgatttgaagaaaatcgaggaccttatacagtctatgcatattgacgctacactgtatactgagagtgatgtacacccgtcctgtaaggtaacggccatgaaatgctttcttctggagctccaggtcatcagcttggagtctggggacgcaagcatccacgatacggttgaaaacctcatcatccttgcgaacaactctctctcatctaatggaaacgttacagagagtgggtgtaaggagtgcgaagagttggaagaaaaaaacatcaaagaatttcttcaatccttcgttcacatagtgcaaatgttcattaacacgtccactaccacacccgccccgaggccacctacgccggcaccgactatcgccagtcaacccctctctctgcgccccgaggcttgccggcctgcggctggtggggcggtccacacccggggcctggattttgcgtgcgatatatacatctgggcacctcttgccggcacctgcggagtgctgcttctctcactcgttattacgctgtactgc

SEQ ID NO: 3788 - DNA, 2157 bp, synthetic construct
  misc_feature 1..2157: note = Synthetic
  source 1..2157: mol_type = other DNA
atggccttaccagtgaccgccttgctcctgccgctggccttgctgctccacgccgccaggccggaggtgcagctgctggaaagcggcggaggcctggtgcaacctggcggcagcctgagactgagctgcgctgcttctggatctctgtttcaggtcgagcacatcggctggttcagacaggcccctggcaaggaacgggacttcgtgtccgcccaggttacaggcggaggctacacctactacgccgacagcgtgaaaggcagattcaccatcagcagagataatagcaagaacaccctgtacctgcagatgaacagcctgaagcccgaggacaccgccgtgtactattgttacgtgcggctcgtggaagaggcctactggggccagggcacacaggtgaccgtgtccagcggtggcggtggctcgggcggtggtgggtcgggtggcggcggatctgaggtgcagctgctggagagcggtggagggctggtgcagccggggggctccctccgcctgagttgtgccgcttccggttctctgtttcaggtggagcacatcggttggttccgccaggcccccggcaaggagcgtgatttcgtctcggcacaagtcactggaggcggctacacctattacgcggacagcgtgaagggccgcttcaccatctctcgggacaactccaagaacacgctttacctgcagatgaattcgctaaaacctgaagacaccgccgtatactactgctacgtgaggttggtggaggaggcttattggggccagggcacccaggttacagtctcctcagcggccgcaaccacgacgccagcgccgcggccaccaacaccggcgcccaccatcgcgtcgcagcccctgtccctgcgcccagaggcgtgccggccagcggcggggggcgcagtgcacacgagggggctggacttcgcctgtgatatctacatctgggcgcccttggccgggacttgtggggtccttctcctgtcactggttatcaccctttactgcaaacggggcagaaagaaactcctgtatatattcaaacaaccatttatgagaccagtacaaactactcaagaggaagatggctgtagctgccgatttccagaagaagaagaaggaggatgtgaactgagagtgaagttcagcaggagcgcagacgcccccgcgtaccagcagggccagaaccagctctataacgagctcaatctaggacgaagagaggagtacgatgttttggacaagagacgtggccgggaccctgagatggggggaaagccgagaaggaagaaccctcaggaaggcctgtacaatgaactgcagaaagataagatggcggaggcctacagtgagattgggatgaaaggcgagcgccggaggggcaaggggcacgatggcctttaccagggtctcagtacagccaccaaggacacctacgacgcccttcacatgcaggccctgccccctcgcggctctggcgagggaaggggttccctgcttacttgcggcgacgtcgaagagaatcccggtccgatggccctcccagtaactgccctccttttgcccctcgcactccttcttcatgccgctcgccccaactgggtcaacgtgattagcgatttgaagaaaatcgaggaccttatacagtctatgcatattgacgctacactgtatactgagagtgatgtacacccgtcctgtaaggtaacggccatgaaatgctttcttctggagctccaggtcatcagcttggagtctggggacgcaagcatccacgatacggttgaaaacctcatcatccttgcgaacaactctctctcatctaatggaaacgttacagagagtgggtgtaaggagtgcgaagagttggaagaaaaaaacatcaaagaatttcttcaatccttcgttcacatagtgcaaatgttcattaacacgtccactaccacacccgccccgaggccacctacgccggcaccgactatcgccagtcaacccctctctctgcgccccgaggcttgccggcctgcggctggtggggcggtccacacccggggcctggattttgcgtgcgatatatacatctgggcacctcttgccggcacctgcggagtgctgcttctctcactcgttattacgctgtactgc

SEQ ID NO: 3789 - DNA, 2193 bp, synthetic construct
  misc_feature 1..2193: note = Synthetic
  source 1..2193: mol_type = other DNA
atggccttaccagtgaccgccttgctcctgccgctggccttgctgctccacgccgccaggccggaggtgcagctgctggaaagcggcggcggactggtgcaacctggcggatctctgcggttgtcttgtgctgccagcggaacaaccttcgcctctagctttatgggctggttccggcaggcccctggcaaggaaagagagttcgtgtccgccatcgtgttcccaggcggcagcacatactatgccgacagcgtgaagggcagattcaccatcagcagagataattcaaagaacaccctgtacctgcagatgaacagcctgaaacccgaggacaccgccgtgtactactgcgccgctagacggtacgagctggtcgacagactggaatacgcctactggggccagggcacacaggtgaccgtgtccagcggtggcggtggctcgggcggtggtgggtcgggtggcggcggatctgaggtgcagctgctggaatctggaggcgggcttgtacagccgggcggttctctccgtctatcatgcgccgcgtcggggactacatttgcttccagttttatgggctggttccgccaggcccccggcaaggagcgggagttcgtcagcgccatcgtgttccctggtggctccacctactacgcggacagcgtgaagggccgattcaccatctctagggacaactccaaaaacacgctgtacctgcagatgaatagcttgaagcccgaggacaccgccgtttattactgtgctgctcgccgctacgagctggtggatcgcctggagtacgcatattggggccaaggcacccaggtcaccgtgtcgtccgcggccgcaaccacgacgccagcgccgcggccaccaacaccggcgcccaccatcgcgtcgcagcccctgtccctgcgcccagaggcgtgccggccagcggcggggggcgcagtgcacacgagggggctggacttcgcctgtgatatctacatctgggcgcccttggccgggacttgtggggtccttctcctgtcactggttatcaccctttactgcaaacggggcagaaagaaactcctgtatatattcaaacaaccatttatgagaccagtacaaactactcaagaggaagatggctgtagctgccgatttccagaagaagaagaaggaggatgtgaactgagagtgaagttcagcaggagcgcagacgcccccgcgtaccagcagggccagaaccagctctataacgagctcaatctaggacgaagagaggagtacgatgttttggacaagagacgtggccgggaccctgagatggggggaaagccgagaaggaagaaccctcaggaaggcctgtacaatgaactgcagaaagataagatggcggaggcctacagtgagattgggatgaaaggcgagcgccggaggggcaaggggcacgatggcctttaccagggtctcagtacagccaccaaggacacctacgacgcccttcacatgcaggccctgccccctcgcggctctggcgagggaaggggttccctgcttacttgcggcgacgtcgaagagaatcccggtccgatggccctcccagtaactgccctccttttgcccctcgcactccttcttcatgccgctcgccccaactgggtcaacgtgattagcgatttgaagaaaatcgaggaccttatacagtctatgcatattgacgctacactgtatactgagagtgatgtacacccgtcctgtaaggtaacggccatgaaatgctttcttctggagctccaggtcatcagcttggagtctggggacgcaagcatccacgatacggttgaaaacctcatcatccttgcgaacaactctctctcatctaatggaaacgttacagagagtgggtgtaaggagtgcgaagagttggaagaaaaaaacatcaaagaatttcttcaatccttcgttcacatagtgcaaatgttcattaacacgtccactaccacacccgccccgaggccacctacgccggcaccgactatcgccagtcaacccctctctctgcgccccgaggcttgccggcctgcggctggtggggcggtccacacccggggcctggattttgcgtgcgatatatacatctgggcacctcttgccggcacctgcggagtgctgcttctctcactcgttattacgctgtactgc

SEQ ID NO: 3790 - DNA, 2163 bp, synthetic construct
  misc_feature 1..2163: note = Synthetic
  source 1..2163: mol_type = other DNA
atggccttaccagtgaccgccttgctcctgccgctggccttgctgctccacgccgccaggccggaggtgcagctgctggaaagcggcggcggactggttcagcctggaggaagcctgagactgtcttgtgccgcctctggctctgtgttcagcagctttaccatcggctggttccggcaggcccccggcaaggagagagaattcgtgtccgccatcgtgacaagcaccggcagcacatactacgctgatagcgtcaagggcagattcacaatcagcagagacaatagcaaaaacaccctgtacctgcaaatgaactccctcaagcctgaggacaccgccgtgtactactgcaacgtgcggacccaggaggactactactattggggccagggcacccaggtgaccgtgtccagcggtggcggtggctcgggcggtggtgggtcgggtggcggcggatctgaggtgcagctgctggagagcggaggtggactggtgcagccgggggggtctttgaggctgagttgtgctgcttctggctccgtgttttcatccttcaccatcggttggttccgccaggcccccggcaaggagcgggagttcgtcagcgcaattgttacttcgaccggctccacttactacgcggacagcgtaaagggccgcttcacaatctcgcgtgacaactccaagaacacgctttacctgcagatgaattccctcaaacctgaagacaccgccgtgtactactgcaacgtgcgcacccaggaggattattactattggggccaaggcacccaggtcaccgtgagctctgcggccgcaaccacgacgccagcgccgcggccaccaacaccggcgcccaccatcgcgtcgcagcccctgtccctgcgcccagaggcgtgccggccagcggcggggggcgcagtgcacacgagggggctggacttcgcctgtgatatctacatctgggcgcccttggccgggacttgtggggtccttctcctgtcactggttatcaccctttactgcaaacggggcagaaagaaactcctgtatatattcaaacaaccatttatgagaccagtacaaactactcaagaggaagatggctgtagctgccgatttccagaagaagaagaaggaggatgtgaactgagagtgaagttcagcaggagcgcagacgcccccgcgtaccagcagggccagaaccagctctataacgagctcaatctaggacgaagagaggagtacgatgttttggacaagagacgtggccgggaccctgagatggggggaaagccgagaaggaagaaccctcaggaaggcctgtacaatgaactgcagaaagataagatggcggaggcctacagtgagattgggatgaaaggcgagcgccggaggggcaaggggcacgatggcctttaccagggtctcagtacagccaccaaggacacctacgacgcccttcacatgcaggccctgccccctcgcggctctggcgagggaaggggttccctgcttacttgcggcgacgtcgaagagaatcccggtccgatggccctcccagtaactgccctccttttgcccctcgcactccttcttcatgccgctcgccccaactgggtcaacgtgattagcgatttgaagaaaatcgaggaccttatacagtctatgcatattgacgctacactgtatactgagagtgatgtacacccgtcctgtaaggtaacggccatgaaatgctttcttctggagctccaggtcatcagcttggagtctggggacgcaagcatccacgatacggttgaaaacctcatcatccttgcgaacaactctctctcatctaatggaaacgttacagagagtgggtgtaaggagtgcgaagagttggaagaaaaaaacatcaaagaatttcttcaatccttcgttcacatagtgcaaatgttcattaacacgtccactaccacacccgccccgaggccacctacgccggcaccgactatcgccagtcaacccctctctctgcgccccgaggcttgccggcctgcggctggtggggcggtccacacccggggcctggattttgcgtgcgatatatacatctgggcacctcttgccggcacctgcggagtgctgcttctctcactcgttattacgctgtactgc

SEQ ID NO: 3791 - DNA, 2193 bp, synthetic construct
  misc_feature 1..2193: note = Synthetic
  source 1..2193: mol_type = other DNA
atggccttaccagtgaccgccttgctcctgccgctggccttgctgctccacgccgccaggccggaggtgcagctgctggaaagcggaggaggcctggtccagccaggcggctccctgagactgagctgtgccgcttctggcagcatcttcggcagccactttatgggctggttccggcaggcccctggcaaagagcgggaattcgtgtccgccgctgtgaccagcggcggatctacatattacgccgacagcgtgaagggcagattcaccatcagcagagataattctaagaacaccctgtacctgcagatgaacagcctcaagcccgaggacaccgccgtgtactactgcgccgccagaacctaccagagcacctaccaacctgagtacgcctactggggccagggcacacaggtgacagtgtccagcggtggcggtggctcgggcggtggtgggtcgggtggcggcggatctgaggtgcagctgctggagagcggaggtgggctggtgcagccggggggttctttgcgcctgtcatgcgccgcatctggctccatcttcggaagtcactttatgggctggttccgccaggcccccggcaaggagagggagttcgtctccgccgccgtgacctccggtggctccacttattacgcggacagcgttaagggccgcttcaccatttctcgtgacaactccaagaacacgctttacctgcagatgaattccctcaaacctgaagatacagccgtgtactactgtgctgctcggacctaccagagcacttaccaaccagagtacgcctattggggccagggcacccaggtcaccgtgtcgtcggcggccgcaaccacgacgccagcgccgcggccaccaacaccggcgcccaccatcgcgtcgcagcccctgtccctgcgcccagaggcgtgccggccagcggcggggggcgcagtgcacacgagggggctggacttcgcctgtgatatctacatctgggcgcccttggccgggacttgtggggtccttctcctgtcactggttatcaccctttactgcaaacggggcagaaagaaactcctgtatatattcaaacaaccatttatgagaccagtacaaactactcaagaggaagatggctgtagctgccgatttccagaagaagaagaaggaggatgtgaactgagagtgaagttcagcaggagcgcagacgcccccgcgtaccagcagggccagaaccagctctataacgagctcaatctaggacgaagagaggagtacgatgttttggacaagagacgtggccgggaccctgagatggggggaaagccgagaaggaagaaccctcaggaaggcctgtacaatgaactgcagaaagataagatggcggaggcctacagtgagattgggatgaaaggcgagcgccggaggggcaaggggcacgatggcctttaccagggtctcagtacagccaccaaggacacctacgacgcccttcacatgcaggccctgccccctcgcggctctggcgagggaaggggttccctgcttacttgcggcgacgtcgaagagaatcccggtccgatggccctcccagtaactgccctccttttgcccctcgcactccttcttcatgccgctcgccccaactgggtcaacgtgattagcgatttgaagaaaatcgaggaccttatacagtctatgcatattgacgctacactgtatactgagagtgatgtacacccgtcctgtaaggtaacggccatgaaatgctttcttctggagctccaggtcatcagcttggagtctggggacgcaagcatccacgatacggttgaaaacctcatcatccttgcgaacaactctctctcatctaatggaaacgttacagagagtgggtgtaaggagtgcgaagagttggaagaaaaaaacatcaaagaatttcttcaatccttcgttcacatagtgcaaatgttcattaacacgtccactaccacacccgccccgaggccacctacgccggcaccgactatcgccagtcaacccctctctctgcgccccgaggcttgccggcctgcggctggtggggcggtccacacccggggcctggattttgcgtgcgatatatacatctgggcacctcttgccggcacctgcggagtgctgcttctctcactcgttattacgctgtactgc

SEQ ID NO: 3792 - DNA, 2205 bp, synthetic construct
  misc_feature 1..2205: note = Synthetic
  source 1..2205: mol_type = other DNA
atggccttaccagtgaccgccttgctcctgccgctggccttgctgctccacgccgccaggccggaggtgcagctgctggaaagcggcggaggcctggtccaacctggcggcagcctgagactgtcttgtgctgcttccggatctatcttcagcatcctggacatcggctggttccgccaggcccctggcaaggaacgggaattcgtgtccgcctatatcagcagcggcggatctacatactacagcgacagcgtgaaaggcagattcaccattagcagagataatagcaagaacaccctgtacctgcagatgaacagcctcaagcccgaggacaccgccgtgtactactgcgtggccacaatctttggcgatagaaccgagggccaggagcggtacgccttctggggccagggcacacaggtgaccgtgtccagcggtggcggtggctcgggcggtggtgggtcgggtggcggcggatctgaggtgcagctgctggagagcggaggagggttggtgcagccgggcgggagccttcgcctgtcatgcgccgcttctggctccattttttctatcctggacatcggttggttccgccaggcccccggcaaggagagggagttcgtcagcgcctacatctcgagcggtggctcgacctattactccgactccgtgaagggccgcttcaccatttctcgggacaactccaagaacacgctgtacctacagatgaattccctcaaacctgaagacactgcagtgtactactgcgtggctaccatctttggtgatcgtactgagggccaggagcgttacgcgttctggggccaaggcacccaggtcacagtttctagtgcggccgcaaccacgacgccagcgccgcggccaccaacaccggcgcccaccatcgcgtcgcagcccctgtccctgcgcccagaggcgtgccggccagcggcggggggcgcagtgcacacgagggggctggacttcgcctgtgatatctacatctgggcgcccttggccgggacttgtggggtccttctcctgtcactggttatcaccctttactgcaaacggggcagaaagaaactcctgtatatattcaaacaaccatttatgagaccagtacaaactactcaagaggaagatggctgtagctgccgatttccagaagaagaagaaggaggatgtgaactgagagtgaagttcagcaggagcgcagacgcccccgcgtaccagcagggccagaaccagctctataacgagctcaatctaggacgaagagaggagtacgatgttttggacaagagacgtggccgggaccctgagatggggggaaagccgagaaggaagaaccctcaggaaggcctgtacaatgaactgcagaaagataagatggcggaggcctacagtgagattgggatgaaaggcgagcgccggaggggcaaggggcacgatggcctttaccagggtctcagtacagccaccaaggacacctacgacgcccttcacatgcaggccctgccccctcgcggctctggcgagggaaggggttccctgcttacttgcggcgacgtcgaagagaatcccggtccgatggccctcccagtaactgccctccttttgcccctcgcactccttcttcatgccgctcgccccaactgggtcaacgtgattagcgatttgaagaaaatcgaggaccttatacagtctatgcatattgacgctacactgtatactgagagtgatgtacacccgtcctgtaaggtaacggccatgaaatgctttcttctggagctccaggtcatcagcttggagtctggggacgcaagcatccacgatacggttgaaaacctcatcatccttgcgaacaactctctctcatctaatggaaacgttacagagagtgggtgtaaggagtgcgaagagttggaagaaaaaaacatcaaagaatttcttcaatccttcgttcacatagtgcaaatgttcattaacacgtccactaccacacccgccccgaggccacctacgccggcaccgactatcgccagtcaacccctctctctgcgccccgaggcttgccggcctgcggctggtggggcggtccacacccggggcctggattttgcgtgcgatatatacatctgggcacctcttgccggcacctgcggagtgctgcttctctcactcgttattacgctgtactgc

SEQ ID NO: 3793 - DNA, 2193 bp, synthetic construct
  misc_feature 1..2193: note = Synthetic
  source 1..2193: mol_type = other DNA
atggccttaccagtgaccgccttgctcctgccgctggccttgctgctccacgccgccaggccggaggtgcagctgctggaaagcggaggcggcctggtccaaccaggcggatctctgcggctgagctgtgccgccagcggctctacaaccagcagctacttcatgggctggtttcggcaggcccctggcaaggaaagagagttcgtgtccgccatcatcacctcctccggcagcccctactacgccgacagcgtgaagggcagattcaccatcagcagagataatagcaagaacaccctgtacctccagatgaacagcctgaaacctgaggatacagccgtgtactactgcgctgctagacggtacggctctagagagacagacgactacggatattggggccagggcacccaggtgaccgtgtctagcggtggcggtggctcgggcggtggtgggtcgggtggcggcggatctgaagtgcagctgctggagagcggcggcggactggtgcagccaggaggttccttgcgcctttcatgcgctgcctctggttccacaacttcgagctactttatggggtggttcagacaggccccggggaaggagagggagttcgtcagcgcaattatcacctcctctggctccccctattacgcggactcggtgaaaggccggttcaccatctctcgcgacaactccaagaacacgctctacctgcagatgaattctctgaagcctgaggacaccgccgtgtactactgtgccgctcgtcgctacggctcccgcgagactgatgactacggttattggggccaaggcacccaggtcaccgttagcagtgcggccgcaaccacgacgccagcgccgcggccaccaacaccggcgcccaccatcgcgtcgcagcccctgtccctgcgcccagaggcgtgccggccagcggcggggggcgcagtgcacacgagggggctggacttcgcctgtgatatctacatctgggcgcccttggccgggacttgtggggtccttctcctgtcactggttatcaccctttactgcaaacggggcagaaagaaactcctgtatatattcaaacaaccatttatgagaccagtacaaactactcaagaggaagatggctgtagctgccgatttccagaagaagaagaaggaggatgtgaactgagagtgaagttcagcaggagcgcagacgcccccgcgtaccagcagggccagaaccagctctataacgagctcaatctaggacgaagagaggagtacgatgttttggacaagagacgtggccgggaccctgagatggggggaaagccgagaaggaagaaccctcaggaaggcctgtacaatgaactgcagaaagataagatggcggaggcctacagtgagattgggatgaaaggcgagcgccggaggggcaaggggcacgatggcctttaccagggtctcagtacagccaccaaggacacctacgacgcccttcacatgcaggccctgccccctcgcggctctggcgagggaaggggttccctgcttacttgcggcgacgtcgaagagaatcccggtccgatggccctcccagtaactgccctccttttgcccctcgcactccttcttcatgccgctcgccccaactgggtcaacgtgattagcgatttgaagaaaatcgaggaccttatacagtctatgcatattgacgctacactgtatactgagagtgatgtacacccgtcctgtaaggtaacggccatgaaatgctttcttctggagctccaggtcatcagcttggagtctggggacgcaagcatccacgatacggttgaaaacctcatcatccttgcgaacaactctctctcatctaatggaaacgttacagagagtgggtgtaaggagtgcgaagagttggaagaaaaaaacatcaaagaatttcttcaatccttcgttcacatagtgcaaatgttcattaacacgtccactaccacacccgccccgaggccacctacgccggcaccgactatcgccagtcaacccctctctctgcgccccgaggcttgccggcctgcggctggtggggcggtccacacccggggcctggattttgcgtgcgatatatacatctgggcacctcttgccggcacctgcggagtgctgcttctctcactcgttattacgctgtactgc

SEQ ID NO: 3794 - DNA, 2199 bp, synthetic construct
  misc_feature 1..2199: note = Synthetic
  source 1..2199: mol_type = other DNA
atggccttaccagtgaccgccttgctcctgccgctggccttgctgctccacgccgccaggccggaggtgcagctgctggaaagcggcggcggcctggtgcaacctggaggctctctgcggctgagctgcgctgcttctggctccgtctttagcagctacagcatgtggttcagacaggcccctggcaaggaaagagagttcgtgtccgccattatcaccagcggcggcagcacctactacgccgatagcgtgaaaggcagattcaccatcagccgggacaatagcaagaacaccctgtacctgcagatgaacagcctcaagcccgaggacaccgccgtgtactattgtgtggccgtgtacggcatcggcacaggccagtacatcggaacatacgacatctggggacagggcacacaggtgaccgtgtctagcggtggcggtggctcgggcggtggtgggtcgggtggcggcggatctgaggtgcagctgctggagagcgggggtggtctggtgcagccgggcgggtcgttgcgtctgtcatgcgccgcttctggctccgtattttctagctactccatgtggttccgccaggcccccggcaaggagcgcgagttcgtctccgccatcatcaccagcggaggctccacttactacgcggacagtgtgaagggccgcttcaccatttctcgggacaactccaagaacacgctttacctgcagatgaattccctcaaacctgaagatactgccgtttattactgcgtggcagtgtacggcatcggtacaggacaatatattgggacctacgacatctggggccagggcacccaggtcaccgtgtcgtccgcggccgcaaccacgacgccagcgccgcggccaccaacaccggcgcccaccatcgcgtcgcagcccctgtccctgcgcccagaggcgtgccggccagcggcggggggcgcagtgcacacgagggggctggacttcgcctgtgatatctacatctgggcgcccttggccgggacttgtggggtccttctcctgtcactggttatcaccctttactgcaaacggggcagaaagaaactcctgtatatattcaaacaaccatttatgagaccagtacaaactactcaagaggaagatggctgtagctgccgatttccagaagaagaagaaggaggatgtgaactgagagtgaagttcagcaggagcgcagacgcccccgcgtaccagcagggccagaaccagctctataacgagctcaatctaggacgaagagaggagtacgatgttttggacaagagacgtggccgggaccctgagatggggggaaagccgagaaggaagaaccctcaggaaggcctgtacaatgaactgcagaaagataagatggcggaggcctacagtgagattgggatgaaaggcgagcgccggaggggcaaggggcacgatggcctttaccagggtctcagtacagccaccaaggacacctacgacgcccttcacatgcaggccctgccccctcgcggctctggcgagggaaggggttccctgcttacttgcggcgacgtcgaagagaatcccggtccgatggccctcccagtaactgccctccttttgcccctcgcactccttcttcatgccgctcgccccaactgggtcaacgtgattagcgatttgaagaaaatcgaggaccttatacagtctatgcatattgacgctacactgtatactgagagtgatgtacacccgtcctgtaaggtaacggccatgaaatgctttcttctggagctccaggtcatcagcttggagtctggggacgcaagcatccacgatacggttgaaaacctcatcatccttgcgaacaactctctctcatctaatggaaacgttacagagagtgggtgtaaggagtgcgaagagttggaagaaaaaaacatcaaagaatttcttcaatccttcgttcacatagtgcaaatgttcattaacacgtccactaccacacccgccccgaggccacctacgccggcaccgactatcgccagtcaacccctctctctgcgccccgaggcttgccggcctgcggctggtggggcggtccacacccggggcctggattttgcgtgcgatatatacatctgggcacctcttgccggcacctgcggagtgctgcttctctcactcgttattacgctgtactgc

SEQ ID NO: 3795 - DNA, 2187 bp, synthetic construct
  misc_feature 1..2187: note = Synthetic
  source 1..2187: mol_type = other DNA
atggccttaccagtgaccgccttgctcctgccgctggccttgctgctccacgccgccaggccggaggtgcagctgctggaaagcggaggaggcctggtccaacctggaggatctctgcggctgagctgcgccgcttctggcagcctgctcagcatctacgacatgggctggtttagacaggcccctggcaaggaacgggaattcgtgtccgccagaatcggcaaaggcggctctacatactacgccgacagcgtgaagggcagattcaccatcagcagagataatagcaagaacaccctgtacctgcagatgaacagcctgaagcccgaggacacagccgtgtactattgtgctgtgctggtgggcgagggcgagagctacggctaccactactggggccagggcacccaggtgaccgtgtccagcggtggcggtggctcgggcggtggtgggtcgggtggcggcggatctgaggtgcaactgctggagagtgggggtggattggtgcagccgggtggctccctccgcctgtcatgcgccgcttctggctcccttctcagcatttacgacatggggtggttccgccaggcccccggcaaggagcgggagttcgtctccgcccgcatcggtaaaggaggctcgacctactacgcggactccgtgaagggcaggtttaccatctctcgtgacaactccaagaacacgctatacctgcagatgaattcgctgaagcctgaagatactgcagtttattactgtgccgtgctggtaggggagggcgagagctacggctaccactattggggccagggcacccaggtcaccgtgtcctctgcggccgcaaccacgacgccagcgccgcggccaccaacaccggcgcccaccatcgcgtcgcagcccctgtccctgcgcccagaggcgtgccggccagcggcggggggcgcagtgcacacgagggggctggacttcgcctgtgatatctacatctgggcgcccttggccgggacttgtggggtccttctcctgtcactggttatcaccctttactgcaaacggggcagaaagaaactcctgtatatattcaaacaaccatttatgagaccagtacaaactactcaagaggaagatggctgtagctgccgatttccagaagaagaagaaggaggatgtgaactgagagtgaagttcagcaggagcgcagacgcccccgcgtaccagcagggccagaaccagctctataacgagctcaatctaggacgaagagaggagtacgatgttttggacaagagacgtggccgggaccctgagatggggggaaagccgagaaggaagaaccctcaggaaggcctgtacaatgaactgcagaaagataagatggcggaggcctacagtgagattgggatgaaaggcgagcgccggaggggcaaggggcacgatggcctttaccagggtctcagtacagccaccaaggacacctacgacgcccttcacatgcaggccctgccccctcgcggctctggcgagggaaggggttccctgcttacttgcggcgacgtcgaagagaatcccggtccgatggccctcccagtaactgccctccttttgcccctcgcactccttcttcatgccgctcgccccaactgggtcaacgtgattagcgatttgaagaaaatcgaggaccttatacagtctatgcatattgacgctacactgtatactgagagtgatgtacacccgtcctgtaaggtaacggccatgaaatgctttcttctggagctccaggtcatcagcttggagtctggggacgcaagcatccacgatacggttgaaaacctcatcatccttgcgaacaactctctctcatctaatggaaacgttacagagagtgggtgtaaggagtgcgaagagttggaagaaaaaaacatcaaagaatttcttcaatccttcgttcacatagtgcaaatgttcattaacacgtccactaccacacccgccccgaggccacctacgccggcaccgactatcgccagtcaacccctctctctgcgccccgaggcttgccggcctgcggctggtggggcggtccacacccggggcctggattttgcgtgcgatatatacatctgggcacctcttgccggcacctgcggagtgctgcttctctcactcgttattacgctgtactgc

SEQ ID NO: 3796 - DNA, 2199 bp, synthetic construct
  misc_feature 1..2199: note = Synthetic
  source 1..2199: mol_type = other DNA
atggccttaccagtgaccgccttgctcctgccgctggccttgctgctccacgccgccaggccggaggtgcagctgctggaaagcggcggcggactggtccaacctggaggcagcctgagactgtcttgtgccgccagcggcatcggcctctccatctactttatgggctggttccggcaggcccctggcaaggaacgggaattcgtgtccgccatcatcagcagcagcggatctacctactacgccgacagcgtgaaaggcagattcaccatctctagagataatagcaagaacaccctgtacctgcagatgaacagcctgaagcccgaggacaccgccgtgtactactgcgctgctagaaccggctacagcgagtacgagcaggaggactacggctattggggccagggcacacaggtgacagtgtccagcggtggcggtggctcgggcggtggtgggtcgggtggcggcggatctgaggtgcagctgctggagagcggaggtgggctggtgcagccgggaggttctctacggttgtcatgcgccgcgtctggcatcggtcttagcatttactttatgggctggttccgccaggcccccgggaaggagagggagttcgtctcggccatcatctcttcttccggctccacttattacgcggacagcgttaagggccgcttcaccatctcgcgtgacaactccaagaacacgctgtacctgcagatgaattccctcaaacctgaagatacagcagtgtactactgtgctgctcgcaccggctactccgagtacgagcaggaggactacggctattggggccaaggcacccaggtcaccgtgtccagtgcggccgcaaccacgacgccagcgccgcggccaccaacaccggcgcccaccatcgcgtcgcagcccctgtccctgcgcccagaggcgtgccggccagcggcggggggcgcagtgcacacgagggggctggacttcgcctgtgatatctacatctgggcgcccttggccgggacttgtggggtccttctcctgtcactggttatcaccctttactgcaaacggggcagaaagaaactcctgtatatattcaaacaaccatttatgagaccagtacaaactactcaagaggaagatggctgtagctgccgatttccagaagaagaagaaggaggatgtgaactgagagtgaagttcagcaggagcgcagacgcccccgcgtaccagcagggccagaaccagctctataacgagctcaatctaggacgaagagaggagtacgatgttttggacaagagacgtggccgggaccctgagatggggggaaagccgagaaggaagaaccctcaggaaggcctgtacaatgaactgcagaaagataagatggcggaggcctacagtgagattgggatgaaaggcgagcgccggaggggcaaggggcacgatggcctttaccagggtctcagtacagccaccaaggacacctacgacgcccttcacatgcaggccctgccccctcgcggctctggcgagggaaggggttccctgcttacttgcggcgacgtcgaagagaatcccggtccgatggccctcccagtaactgccctccttttgcccctcgcactccttcttcatgccgctcgccccaactgggtcaacgtgattagcgatttgaagaaaatcgaggaccttatacagtctatgcatattgacgctacactgtatactgagagtgatgtacacccgtcctgtaaggtaacggccatgaaatgctttcttctggagctccaggtcatcagcttggagtctggggacgcaagcatccacgatacggttgaaaacctcatcatccttgcgaacaactctctctcatctaatggaaacgttacagagagtgggtgtaaggagtgcgaagagttggaagaaaaaaacatcaaagaatttcttcaatccttcgttcacatagtgcaaatgttcattaacacgtccactaccacacccgccccgaggccacctacgccggcaccgactatcgccagtcaacccctctctctgcgccccgaggcttgccggcctgcggctggtggggcggtccacacccggggcctggattttgcgtgcgatatatacatctgggcacctcttgccggcacctgcggagtgctgcttctctcactcgttattacgctgtactgc

SEQ ID NO: 3797 - DNA, 2193 bp, synthetic construct
  misc_feature 1..2193: note = Synthetic
  source 1..2193: mol_type = other DNA
atggccttaccagtgaccgccttgctcctgccgctggccttgctgctccacgccgccaggccggaggtgcagctgctggaaagcggcggaggcctggtgcaacctggaggatctctcagactgagctgcgccgcttctggcagcatcttcagcagctccttcatcggctggttcagacaggcccctggcaaagagcgggaattcgtgtccgccgtgatcgcctcttctggcagcacctactacgccgacagcgtgaagggccggtttaccatcagcagagataatagcaagaacaccctgtacctgcagatgaacagcctgaagcccgaggacaccgccgtgtactattgtgctggcagattcggccagggcggcggcacagtcgagtacggctactggggccagggaacacaggtgaccgtgtccagcggtggcggtggctcgggcggtggtgggtcgggtggcggcggatctgaggtgcaactgctggagagcggcggcgggcttgtgcagccggggggctccctccggctgtcatgcgcggcctctggctccatcttcagcagctcctttatcggttggttccgccaggcccccggcaaggagcgcgagttcgtctctgcagtaattgcttcctctggttcgacttattacgcggacagtgttaaaggccgcttcaccatcagcagggacaactccaagaacacgctgtacttgcagatgaattccctgaagcctgaagatacagccgtgtactactgtgctggccgcttcggacagggcggtggtaccgtggagtacggctactggggccaggggacccaggtgaccgtctcttcggcggccgcaaccacgacgccagcgccgcggccaccaacaccggcgcccaccatcgcgtcgcagcccctgtccctgcgcccagaggcgtgccggccagcggcggggggcgcagtgcacacgagggggctggacttcgcctgtgatatctacatctgggcgcccttggccgggacttgtggggtccttctcctgtcactggttatcaccctttactgcaaacggggcagaaagaaactcctgtatatattcaaacaaccatttatgagaccagtacaaactactcaagaggaagatggctgtagctgccgatttccagaagaagaagaaggaggatgtgaactgagagtgaagttcagcaggagcgcagacgcccccgcgtaccagcagggccagaaccagctctataacgagctcaatctaggacgaagagaggagtacgatgttttggacaagagacgtggccgggaccctgagatggggggaaagccgagaaggaagaaccctcaggaaggcctgtacaatgaactgcagaaagataagatggcggaggcctacagtgagattgggatgaaaggcgagcgccggaggggcaaggggcacgatggcctttaccagggtctcagtacagccaccaaggacacctacgacgcccttcacatgcaggccctgccccctcgcggctctggcgagggaaggggttccctgcttacttgcggcgacgtcgaagagaatcccggtccgatggccctcccagtaactgccctccttttgcccctcgcactccttcttcatgccgctcgccccaactgggtcaacgtgattagcgatttgaagaaaatcgaggaccttatacagtctatgcatattgacgctacactgtatactgagagtgatgtacacccgtcctgtaaggtaacggccatgaaatgctttcttctggagctccaggtcatcagcttggagtctggggacgcaagcatccacgatacggttgaaaacctcatcatccttgcgaacaactctctctcatctaatggaaacgttacagagagtgggtgtaaggagtgcgaagagttggaagaaaaaaacatcaaagaatttcttcaatccttcgttcacatagtgcaaatgttcattaacacgtccactaccacacccgccccgaggccacctacgccggcaccgactatcgccagtcaacccctctctctgcgccccgaggcttgccggcctgcggctggtggggcggtccacacccggggcctggattttgcgtgcgatatatacatctgggcacctcttgccggcacctgcggagtgctgcttctctcactcgttattacgctgtactgc

SEQ ID NO: 3798 - DNA, 2193 bp, synthetic construct
  misc_feature 1..2193: note = Synthetic
  source 1..2193: mol_type = other DNA
atggccttaccagtgaccgccttgctcctgccgctggccttgctgctccacgccgccaggccggaagtgcagctgctggaaagcggcggaggcctggtccaacctggaggatctctcagactgagctgtgccgccagcggcagagtgttcagcttctacttcatgggctggttccggcaggcccctggcaaagagcgggaatttgtgtccggcgtgatcggcaagacaggctctacatactacaccgacagcgtgaagggcagattcaccatcagcagagataatagcaagaacaccctgtacctgcagatgaacagcctgaagcccgaggacaccgccgtgtactactgcgctgcttctgagtaccagggcaccggctacggcgagtttgcctattggggccagggaacacaggtgaccgtgtccagcggtggcggtggctcgggcggtggtgggtcgggtggcggcggatctgaggtacagctgctggagagcgggggaggactggtgcagccgggcggcagccttaggctgtcttgcgcagcttccggtcgcgtgttctccttttatttcatggggtggttccgccaggcccctggtaaggagcgcgagttcgtctccggtgttattggcaagaccggctccacttactacactgattctgtgaagggccgcttcaccatcagccgggacaactccaaaaacacgttgtacctgcagatgaattctctcaagcccgaggacaccgccgtgtactactgtgctgccagtgagtaccaggggacaggctacggcgaatttgcctattggggccagggcacccaagtcaccgtgtcgtcggcggccgcaaccacgacgccagcgccgcggccaccaacaccggcgcccaccatcgcgtcgcagcccctgtccctgcgcccagaggcgtgccggccagcggcggggggcgcagtgcacacgagggggctggacttcgcctgtgatatctacatctgggcgcccttggccgggacttgtggggtccttctcctgtcactggttatcaccctttactgcaaacggggcagaaagaaactcctgtatatattcaaacaaccatttatgagaccagtacaaactactcaagaggaagatggctgtagctgccgatttccagaagaagaagaaggaggatgtgaactgagagtgaagttcagcaggagcgcagacgcccccgcgtaccagcagggccagaaccagctctataacgagctcaatctaggacgaagagaggagtacgatgttttggacaagagacgtggccgggaccctgagatggggggaaagccgagaaggaagaaccctcaggaaggcctgtacaatgaactgcagaaagataagatggcggaggcctacagtgagattgggatgaaaggcgagcgccggaggggcaaggggcacgatggcctttaccagggtctcagtacagccaccaaggacacctacgacgcccttcacatgcaggccctgccccctcgcggctctggcgagggaaggggttccctgcttacttgcggcgacgtcgaagagaatcccggtccgatggccctcccagtaactgccctccttttgcccctcgcactccttcttcatgccgctcgccccaactgggtcaacgtgattagcgatttgaagaaaatcgaggaccttatacagtctatgcatattgacgctacactgtatactgagagtgatgtacacccgtcctgtaaggtaacggccatgaaatgctttcttctggagctccaggtcatcagcttggagtctggggacgcaagcatccacgatacggttgaaaacctcatcatccttgcgaacaactctctctcatctaatggaaacgttacagagagtgggtgtaaggagtgcgaagagttggaagaaaaaaacatcaaagaatttcttcaatccttcgttcacatagtgcaaatgttcattaacacgtccactaccacacccgccccgaggccacctacgccggcaccgactatcgccagtcaacccctctctctgcgccccgaggcttgccggcctgcggctggtggggcggtccacacccggggcctggattttgcgtgcgatatatacatctgggcacctcttgccggcacctgcggagtgctgcttctctcactcgttattacgctgtactgc

SEQ ID NO: 3799 - DNA, 2157 bp, synthetic construct
  misc_feature 1..2157: note = Synthetic
  source 1..2157: mol_type = other DNA
atggccttaccagtgaccgccttgctcctgccgctggccttgctgctccacgccgccaggccggaggtgcagctgctggaaagcggaggcggcctggtgcaacctggcggatctctgagactgagctgtgctgcttctggcagcctgttcgaggttgagcacatcggctggtttagacaggcccctggaaaagagcgggaattcgtgtccgcccaggtgaccggcggcggctacacctactatgccgacagcgtgaagggcagattcaccatcagcagagataatagcaagaacaccctgtacctgcagatgaacagcctcaagcccgaggacaccgccgtgtactactgctacgtgcggctggtcgaggaagcctactggggccagggcacacaggtgacagtgtccagcggtggcggtggctcgggcggtggtgggtcgggtggcggcggatctgaggtgcagctgctggagagcggaggcggtctcgtccaacctggcggctcccttcgtttgtcatgcgccgcttccggttctctgtttgaggtggagcacatcggttggttccgccaggcccccgggaaggagcgggagttcgtctccgcccaggtcacaggcgggggctacacctattacgcggacagtgtaaaaggacgcttcaccatttctagggacaactccaagaacacgctgtacctgcagatgaattccctcaagccggaagatactgcagtgtactactgttacgtgcgcctggtggaggaggcctattggggccagggcacccaggttaccgtgagctcggcggccgcaaccacgacgccagcgccgcggccaccaacaccggcgcccaccatcgcgtcgcagcccctgtccctgcgcccagaggcgtgccggccagcggcggggggcgcagtgcacacgagggggctggacttcgcctgtgatatctacatctgggcgcccttggccgggacttgtggggtccttctcctgtcactggttatcaccctttactgcaaacggggcagaaagaaactcctgtatatattcaaacaaccatttatgagaccagtacaaactactcaagaggaagatggctgtagctgccgatttccagaagaagaagaaggaggatgtgaactgagagtgaagttcagcaggagcgcagacgcccccgcgtaccagcagggccagaaccagctctataacgagctcaatctaggacgaagagaggagtacgatgttttggacaagagacgtggccgggaccctgagatggggggaaagccgagaaggaagaaccctcaggaaggcctgtacaatgaactgcagaaagataagatggcggaggcctacagtgagattgggatgaaaggcgagcgccggaggggcaaggggcacgatggcctttaccagggtctcagtacagccaccaaggacacctacgacgcccttcacatgcaggccctgccccctcgcggctctggcgagggaaggggttccctgcttacttgcggcgacgtcgaagagaatcccggtccgatggccctcccagtaactgccctccttttgcccctcgcactccttcttcatgccgctcgccccaactgggtcaacgtgattagcgatttgaagaaaatcgaggaccttatacagtctatgcatattgacgctacactgtatactgagagtgatgtacacccgtcctgtaaggtaacggccatgaaatgctttcttctggagctccaggtcatcagcttggagtctggggacgcaagcatccacgatacggttgaaaacctcatcatccttgcgaacaactctctctcatctaatggaaacgttacagagagtgggtgtaaggagtgcgaagagttggaagaaaaaaacatcaaagaatttcttcaatccttcgttcacatagtgcaaatgttcattaacacgtccactaccacacccgccccgaggccacctacgccggcaccgactatcgccagtcaacccctctctctgcgccccgaggcttgccggcctgcggctggtggggcggtccacacccggggcctggattttgcgtgcgatatatacatctgggcacctcttgccggcacctgcggagtgctgcttctctcactcgttattacgctgtactgc

SEQ ID NO: 3800 - DNA, 2205 bp, synthetic construct
  misc_feature 1..2205: note = Synthetic
  source 1..2205: mol_type = other DNA
atggccttaccagtgaccgccttgctcctgccgctggccttgctgctccacgccgccaggccggaggtgcagctgctggaaagcggcggaggactggtccagcctggcggcagcctgcggctgagctgcgccgcctctggcagaatcttcggcgagtacttcatcggatggtttcggcaggccccaggaaaagagcgcgagttcgtgtccgccattatcacaggcagcggcatcacccactacgccgacagcgtgaagggcagattcaccatctccagagacaactctaagaataccctgtacctgcagatgaacagcctcaagcctgaagatacagccgtgtactactgtgctgctagaacagactacaccaccggccaagagctgcccgaatatggctactggggccagggcacccaggtgaccgtgagcagcggtggcggtggctcgggcggtggtgggtcgggtggcggcggatctgaggtgcagctgctggagagcggtggtggtctggtgcagccgggggggagcctacggttgtcatgcgcggcaagtgggcgcatcttcggcgagtacttcatcggatggttccgccaggccccaggcaaggagagggagttcgtctcggccatcattaccggctccggcatcactcactacgcggacagcgttaagggccgcttcaccatctctcgcgacaactccaagaacacgctttacctgcagatgaattccctcaaacctgaagacaccgccgtgtactactgtgctgctcgtactgattacaccacaggacaggagctgcccgagtacggctattggggccaaggcacccaggtcaccgtgtcctctgcggccgcaaccacgacgccagcgccgcggccaccaacaccggcgcccaccatcgcgtcgcagcccctgtccctgcgcccagaggcgtgccggccagcggcggggggcgcagtgcacacgagggggctggacttcgcctgtgatatctacatctgggcgcccttggccgggacttgtggggtccttctcctgtcactggttatcaccctttactgcaaacggggcagaaagaaactcctgtatatattcaaacaaccatttatgagaccagtacaaactactcaagaggaagatggctgtagctgccgatttccagaagaagaagaaggaggatgtgaactgagagtgaagttcagcaggagcgcagacgcccccgcgtaccagcagggccagaaccagctctataacgagctcaatctaggacgaagagaggagtacgatgttttggacaagagacgtggccgggaccctgagatggggggaaagccgagaaggaagaaccctcaggaaggcctgtacaatgaactgcagaaagataagatggcggaggcctacagtgagattgggatgaaaggcgagcgccggaggggcaaggggcacgatggcctttaccagggtctcagtacagccaccaaggacacctacgacgcccttcacatgcaggccctgccccctcgcggctctggcgagggaaggggttccctgcttacttgcggcgacgtcgaagagaatcccggtccgatggccctcccagtaactgccctccttttgcccctcgcactccttcttcatgccgctcgccccaactgggtcaacgtgattagcgatttgaagaaaatcgaggaccttatacagtctatgcatattgacgctacactgtatactgagagtgatgtacacccgtcctgtaaggtaacggccatgaaatgctttcttctggagctccaggtcatcagcttggagtctggggacgcaagcatccacgatacggttgaaaacctcatcatccttgcgaacaactctctctcatctaatggaaacgttacagagagtgggtgtaaggagtgcgaagagttggaagaaaaaaacatcaaagaatttcttcaatccttcgttcacatagtgcaaatgttcattaacacgtccactaccacacccgccccgaggccacctacgccggcaccgactatcgccagtcaacccctctctctgcgccccgaggcttgccggcctgcggctggtggggcggtccacacccggggcctggattttgcgtgcgatatatacatctgggcacctcttgccggcacctgcggagtgctgcttctctcactcgttattacgctgtactgc

SEQ ID NO: 3801 - DNA, 2175 bp, synthetic construct
  misc_feature 1..2175: note = Synthetic
  source 1..2175: mol_type = other DNA
atggccttaccagtgaccgccttgctcctgccgctggccttgctgctccacgccgccaggccggaggtgcagctgctggaaagcggcggcggcctcgtgcaacctggcggaagcctgagactgagctgcgccgcttctggctctatcgagagcatctacttcatcggctggttcagacaggcccctggcaaggaacgggaattcgtgtccgccgagtttatccccggaggcagcaccgtctacagcgacagcgtgaagggcagattcaccatcagcagagataacagcaagaacaccctgtacctgcagatgaacagcctgaaaccagaggacaccgccgtgtactactgtaatgccggcctggacgagggccggtactatacatactggggccagggcacacaggtgaccgtgtctagcggtggcggtggctcgggcggtggtgggtcgggtggcggcggatctgaggtgcagctgctggagagtggaggagggctggtgcagccagggggttctttgcgcctgagctgtgctgcttccggctccattgagagcatctactttatcggttggttccgccaggcccccggcaaggagagggagttcgtctcggcggagttcatcccgggcggctccactgtttacagcgattctgtgaagggccgcttcaccatctctcgggacaactccaagaacacgctatacctgcaaatgaacagccttaaacctgaagacaccgccgtgtactactgcaatgcaggtctcgacgagggccgttattacacctattggggccagggcacccaggtcacagtgtcgtccgcggccgcaaccacgacgccagcgccgcggccaccaacaccggcgcccaccatcgcgtcgcagcccctgtccctgcgcccagaggcgtgccggccagcggcggggggcgcagtgcacacgagggggctggacttcgcctgtgatatctacatctgggcgcccttggccgggacttgtggggtccttctcctgtcactggttatcaccctttactgcaaacggggcagaaagaaactcctgtatatattcaaacaaccatttatgagaccagtacaaactactcaagaggaagatggctgtagctgccgatttccagaagaagaagaaggaggatgtgaactgagagtgaagttcagcaggagcgcagacgcccccgcgtaccagcagggccagaaccagctctataacgagctcaatctaggacgaagagaggagtacgatgttttggacaagagacgtggccgggaccctgagatggggggaaagccgagaaggaagaaccctcaggaaggcctgtacaatgaactgcagaaagataagatggcggaggcctacagtgagattgggatgaaaggcgagcgccggaggggcaaggggcacgatggcctttaccagggtctcagtacagccaccaaggacacctacgacgcccttcacatgcaggccctgccccctcgcggctctggcgagggaaggggttccctgcttacttgcggcgacgtcgaagagaatcccggtccgatggccctcccagtaactgccctccttttgcccctcgcactccttcttcatgccgctcgccccaactgggtcaacgtgattagcgatttgaagaaaatcgaggaccttatacagtctatgcatattgacgctacactgtatactgagagtgatgtacacccgtcctgtaaggtaacggccatgaaatgctttcttctggagctccaggtcatcagcttggagtctggggacgcaagcatccacgatacggttgaaaacctcatcatccttgcgaacaactctctctcatctaatggaaacgttacagagagtgggtgtaaggagtgcgaagagttggaagaaaaaaacatcaaagaatttcttcaatccttcgttcacatagtgcaaatgttcattaacacgtccactaccacacccgccccgaggccacctacgccggcaccgactatcgccagtcaacccctctctctgcgccccgaggcttgccggcctgcggctggtggggcggtccacacccggggcctggattttgcgtgcgatatatacatctgggcacctcttgccggcacctgcggagtgctgcttctctcactcgttattacgctgtactgc

SEQ ID NO: 3802 - DNA, 2157 bp, synthetic construct
  misc_feature 1..2157: note = Synthetic
  source 1..2157: mol_type = other DNA
atggccttaccagtgaccgccttgctcctgccgctggccttgctgctccacgccgccaggccggaggttcagctgctggaaagcggaggcggcctggtgcaacctggcggcagcctgcggctgagctgtgccgcttctggcatcgaggtgtctagcagcgtggtcggctggtttagacaggcccctggcaaggaaagagagttcgtgtccgccagcggcgtgggcggatctacatactacgctgatagcgtgaaaggcagattcaccatcagccgggacaatagcaagaacaccctgtacctgcagatgaacagcctcaagcccgaggacaccgccgtgtattactgctacgccgtgtacctgaccatctacacatactggggacagggcacacaggtgaccgtgtcctccggtggcggtggctcgggcggtggtgggtcgggtggcggcggatctgaagtgcagctgctggagagcggaggtgggctggtgcagccggggggttctcttcgtctatcatgcgccgcttctggcattgaggtgagcagttccgtggtgggttggttccggcaggcccctggcaaggagcgcgagttcgtctccgcctccggagtaggcggctccacatactacgcggacagcgttaaaggccgctttactatctctcgcgataactccaagaacactctgtacctgcagatgaattccctcaagcccgaggacaccgccgtgtactattgttacgcagtctacttgacgatctacacctattggggccaaggcacccaggtcaccgtgtcgtcggcggccgcaaccacgacgccagcgccgcggccaccaacaccggcgcccaccatcgcgtcgcagcccctgtccctgcgcccagaggcgtgccggccagcggcggggggcgcagtgcacacgagggggctggacttcgcctgtgatatctacatctgggcgcccttggccgggacttgtggggtccttctcctgtcactggttatcaccctttactgcaaacggggcagaaagaaactcctgtatatattcaaacaaccatttatgagaccagtacaaactactcaagaggaagatggctgtagctgccgatttccagaagaagaagaaggaggatgtgaactgagagtgaagttcagcaggagcgcagacgcccccgcgtaccagcagggccagaaccagctctataacgagctcaatctaggacgaagagaggagtacgatgttttggacaagagacgtggccgggaccctgagatggggggaaagccgagaaggaagaaccctcaggaaggcctgtacaatgaactgcagaaagataagatggcggaggcctacagtgagattgggatgaaaggcgagcgccggaggggcaaggggcacgatggcctttaccagggtctcagtacagccaccaaggacacctacgacgcccttcacatgcaggccctgccccctcgcggctctggcgagggaaggggttccctgcttacttgcggcgacgtcgaagagaatcccggtccgatggccctcccagtaactgccctccttttgcccctcgcactccttcttcatgccgctcgccccaactgggtcaacgtgattagcgatttgaagaaaatcgaggaccttatacagtctatgcatattgacgctacactgtatactgagagtgatgtacacccgtcctgtaaggtaacggccatgaaatgctttcttctggagctccaggtcatcagcttggagtctggggacgcaagcatccacgatacggttgaaaacctcatcatccttgcgaacaactctctctcatctaatggaaacgttacagagagtgggtgtaaggagtgcgaagagttggaagaaaaaaacatcaaagaatttcttcaatccttcgttcacatagtgcaaatgttcattaacacgtccactaccacacccgccccgaggccacctacgccggcaccgactatcgccagtcaacccctctctctgcgccccgaggcttgccggcctgcggctggtggggcggtccacacccggggcctggattttgcgtgcgatatatacatctgggcacctcttgccggcacctgcggagtgctgcttctctcactcgttattacgctgtactgc

SEQ ID NO: 3803 - DNA, 2163 bp, synthetic construct
  misc_feature 1..2163: note = Synthetic
  source 1..2163: mol_type = other DNA
atggccttaccagtgaccgccttgctcctgccgctggccttgctgctccacgccgccaggccggaggtgcagctcctggaaagcggcggaggcctggtgcaacctggaggctctctgagactgtcttgtgccgctagcggatttaccatctccagatacgccatggcctggttccggcaggcccctggcaaggaaagagagttcgtgtccggcagcatcttcgtgggcggcggcacatactatagagatagcgtgaaaggccgcttcaccatcagccgggacaatagcaagaacaccctgtacctgcagatgaacagcctgaagcccgaggacaccgccgtgtactactgctacgctacagtcggcgacagctactactactggggccagggcacccaggtgacagtgtctagcggtggcggtggctcgggcggtggtgggtcgggtggcggcggatctgaggtgcagctgctggagagcggtggagggctggtgcagccgggaggctccctccgcttgtcatgcgctgcaagtggctttactatttcccgctacgccatggcttggttcaggcaagcccccggcaaggagcgggagttcgttagcggctccatcttcgtcggtggtggcacctactaccgtgattctgtgaagggccgcttcaccatctctcgcgacaactccaagaacacgctttacctgcagatgaattctctgaaacctgaagacactgccgtgtactactgttacgcgacagtaggggacagctattactattggggccagggcacccaggtcaccgtgtcgtcggcggccgcaaccacgacgccagcgccgcggccaccaacaccggcgcccaccatcgcgtcgcagcccctgtccctgcgcccagaggcgtgccggccagcggcggggggcgcagtgcacacgagggggctggacttcgcctgtgatatctacatctgggcgcccttggccgggacttgtggggtccttctcctgtcactggttatcaccctttactgcaaacggggcagaaagaaactcctgtatatattcaaacaaccatttatgagaccagtacaaactactcaagaggaagatggctgtagctgccgatttccagaagaagaagaaggaggatgtgaactgagagtgaagttcagcaggagcgcagacgcccccgcgtaccagcagggccagaaccagctctataacgagctcaatctaggacgaagagaggagtacgatgttttggacaagagacgtggccgggaccctgagatggggggaaagccgagaaggaagaaccctcaggaaggcctgtacaatgaactgcagaaagataagatggcggaggcctacagtgagattgggatgaaaggcgagcgccggaggggcaaggggcacgatggcctttaccagggtctcagtacagccaccaaggacacctacgacgcccttcacatgcaggccctgccccctcgcggctctggcgagggaaggggttccctgcttacttgcggcgacgtcgaagagaatcccggtccgatggccctcccagtaactgccctccttttgcccctcgcactccttcttcatgccgctcgccccaactgggtcaacgtgattagcgatttgaagaaaatcgaggaccttatacagtctatgcatattgacgctacactgtatactgagagtgatgtacacccgtcctgtaaggtaacggccatgaaatgctttcttctggagctccaggtcatcagcttggagtctggggacgcaagcatccacgatacggttgaaaacctcatcatccttgcgaacaactctctctcatctaatggaaacgttacagagagtgggtgtaaggagtgcgaagagttggaagaaaaaaacatcaaagaatttcttcaatccttcgttcacatagtgcaaatgttcattaacacgtccactaccacacccgccccgaggccacctacgccggcaccgactatcgccagtcaacccctctctctgcgccccgaggcttgccggcctgcggctggtggggcggtccacacccggggcctggattttgcgtgcgatatatacatctgggcacctcttgccggcacctgcggagtgctgcttctctcactcgttattacgctgtactgc

SEQ ID NO: 3804 - DNA, 2157 bp, synthetic construct
  misc_feature 1..2157: note = Synthetic
  source 1..2157: mol_type = other DNA
atggccttaccagtgaccgccttgctcctgccgctggccttgctgctccacgccgccaggccggaggtgcagctgctggaaagcggcggaggcctggtgcaacctggaggcagcctgagactgagctgcgctgcttctggcagcctgttcagcgtggaacacatcggctggtttagacaggcccctggcaaagagcgggagttcgtgtccgcccaggttacaggcggcggctacacctactacgccgacagcgtgaagggcagattcaccatcagcagagataatagcaagaacaccctgtacctgcagatgaacagcctcaagcccgaggacaccgccgtgtactattgttacgtgcggctggtcgaggaagcctactggggccagggcacccaggtgacagtgtcttctggtggcggtggctcgggcggtggtgggtcgggtggcggcggatctgaggtgcagctgctggagagcggagggggattggtgcagccggggggctcccttcgtctaagttgcgccgcttccggttctctgttttcagtggagcacatcggttggttccgccaggcccccggcaaggagcgggagttcgtcagcgcacaagtcaccggcggtggctacacctattacgcggacagcgttaagggccgcttcaccatttctagggacaactccaagaacacgctgtacctgcagatgaattccctcaaacctgaagatacagccgtgtactactgttacgtgcgcctggtggaggaggcttattggggccagggcacccaggtcactgtatcgtcggcggccgcaaccacgacgccagcgccgcggccaccaacaccggcgcccaccatcgcgtcgcagcccctgtccctgcgcccagaggcgtgccggccagcggcggggggcgcagtgcacacgagggggctggacttcgcctgtgatatctacatctgggcgcccttggccgggacttgtggggtccttctcctgtcactggttatcaccctttactgcaaacggggcagaaagaaactcctgtatatattcaaacaaccatttatgagaccagtacaaactactcaagaggaagatggctgtagctgccgatttccagaagaagaagaaggaggatgtgaactgagagtgaagttcagcaggagcgcagacgcccccgcgtaccagcagggccagaaccagctctataacgagctcaatctaggacgaagagaggagtacgatgttttggacaagagacgtggccgggaccctgagatggggggaaagccgagaaggaagaaccctcaggaaggcctgtacaatgaactgcagaaagataagatggcggaggcctacagtgagattgggatgaaaggcgagcgccggaggggcaaggggcacgatggcctttaccagggtctcagtacagccaccaaggacacctacgacgcccttcacatgcaggccctgccccctcgcggctctggcgagggaaggggttccctgcttacttgcggcgacgtcgaagagaatcccggtccgatggccctcccagtaactgccctccttttgcccctcgcactccttcttcatgccgctcgccccaactgggtcaacgtgattagcgatttgaagaaaatcgaggaccttatacagtctatgcatattgacgctacactgtatactgagagtgatgtacacccgtcctgtaaggtaacggccatgaaatgctttcttctggagctccaggtcatcagcttggagtctggggacgcaagcatccacgatacggttgaaaacctcatcatccttgcgaacaactctctctcatctaatggaaacgttacagagagtgggtgtaaggagtgcgaagagttggaagaaaaaaacatcaaagaatttcttcaatccttcgttcacatagtgcaaatgttcattaacacgtccactaccacacccgccccgaggccacctacgccggcaccgactatcgccagtcaacccctctctctgcgccccgaggcttgccggcctgcggctggtggggcggtccacacccggggcctggattttgcgtgcgatatatacatctgggcacctcttgccggcacctgcggagtgctgcttctctcactcgttattacgctgtactgc

SEQ ID NO: 3805 - DNA, 2163 bp, synthetic construct
  misc_feature 1..2163: note = Synthetic
  source 1..2163: mol_type = other DNA
atggccttaccagtgaccgccttgctcctgccgctggccttgctgctccacgccgccaggccggaggtgcagctgctggaaagcggaggcggcctggtccaacctggaggcagcctgagactgagctgcgccgctagcggctttatcttcagcatctacgacatgggctggttccggcaggcccctggcaaagagcgggaattcgtgtccgccatctctacaacaggcggatctatctactacgccgacagcgtgaagggcagattcaccatcagcagagataacagcaagaacaccctgtacctgcagatgaactccctcaagcccgaggacaccgccgtgtactattgtaatgctgatccactggagagctacggctactggggccagggcacccaggtgaccgtgtctagcggtggcggtggctcgggcggtggtgggtcgggtggcggcggatctgaggtgcaactgctggagagtgggggagggctggtgcagccgggaggctccctccgtctttcgtgtgctgcttccggcttcatcttttcaatttacgacatgggctggttccgccaggcccccggcaaggagcgcgagttcgtctctgccatctcgaccacaggtggttccatctattacgcggacagcgtgaagggtcgcttcaccatctctcgggacaactccaagaacacgctatacctgcagatgaacagcttgaaacctgaagatactgccgtgtactactgcaatgcagaccccctggagagctacggctattggggccagggcacccaggtcaccgtttcttccgcggccgcaaccacgacgccagcgccgcggccaccaacaccggcgcccaccatcgcgtcgcagcccctgtccctgcgcccagaggcgtgccggccagcggcggggggcgcagtgcacacgagggggctggacttcgcctgtgatatctacatctgggcgcccttggccgggacttgtggggtccttctcctgtcactggttatcaccctttactgcaaacggggcagaaagaaactcctgtatatattcaaacaaccatttatgagaccagtacaaactactcaagaggaagatggctgtagctgccgatttccagaagaagaagaaggaggatgtgaactgagagtgaagttcagcaggagcgcagacgcccccgcgtaccagcagggccagaaccagctctataacgagctcaatctaggacgaagagaggagtacgatgttttggacaagagacgtggccgggaccctgagatggggggaaagccgagaaggaagaaccctcaggaaggcctgtacaatgaactgcagaaagataagatggcggaggcctacagtgagattgggatgaaaggcgagcgccggaggggcaaggggcacgatggcctttaccagggtctcagtacagccaccaaggacacctacgacgcccttcacatgcaggccctgccccctcgcggctctggcgagggaaggggttccctgcttacttgcggcgacgtcgaagagaatcccggtccgatggccctcccagtaactgccctccttttgcccctcgcactccttcttcatgccgctcgccccaactgggtcaacgtgattagcgatttgaagaaaatcgaggaccttatacagtctatgcatattgacgctacactgtatactgagagtgatgtacacccgtcctgtaaggtaacggccatgaaatgctttcttctggagctccaggtcatcagcttggagtctggggacgcaagcatccacgatacggttgaaaacctcatcatccttgcgaacaactctctctcatctaatggaaacgttacagagagtgggtgtaaggagtgcgaagagttggaagaaaaaaacatcaaagaatttcttcaatccttcgttcacatagtgcaaatgttcattaacacgtccactaccacacccgccccgaggccacctacgccggcaccgactatcgccagtcaacccctctctctgcgccccgaggcttgccggcctgcggctggtggggcggtccacacccggggcctggattttgcgtgcgatatatacatctgggcacctcttgccggcacctgcggagtgctgcttctctcactcgttattacgctgtactgc

SEQ ID NO: 3806 - DNA, 2175 bp, synthetic construct
  misc_feature 1..2175: note = Synthetic
  source 1..2175: mol_type = other DNA
atggccttaccagtgaccgccttgctcctgccgctggccttgctgctccacgccgccaggccggaggtgcagctgctggaatctggcggcggactggtgcaacctggcggcagcctgagactgagctgcgccgcttctggctctgtgttcagctcctactttatcggctggttccggcaggcccctggaaaggaaagagagttcgtgtccgccgtgatctccagcagcggaagcacctactacgccgacagcgtgaaaggcagattcaccatcagccgggacaatagcaagaacaccctgtacctgcagatgaacagcctcaagcccgaggacacagctgtctactattgtgtggccagagaagatgtgggcgagccatacggctactggggccagggcacacaggtgaccgtgtctagcggtggcggtggctcgggcggtggtgggtcgggtggcggcggatctgaggtgcagctgctggagagcggcggcggtctggtgcagccgggaggctccctccgcctgtcatgcgccgcttccggatcggtgttttctagctacttcatcggttggttccgccaggcccccgggaaggagcgggagttcgtctccgccgtgatttcttcttctggctccacctactacgcggacagcgtgaagggtcgcttcaccatctcgcgtgacaactccaaaaacacgctttacctgcagatgaattccttgaagcctgaagatacagccgtgtactactgcgtggcaagggaggacgtgggggagccctatggctattggggccaaggcacccaggtcactgtatccagtgcggccgcaaccacgacgccagcgccgcggccaccaacaccggcgcccaccatcgcgtcgcagcccctgtccctgcgcccagaggcgtgccggccagcggcggggggcgcagtgcacacgagggggctggacttcgcctgtgatatctacatctgggcgcccttggccgggacttgtggggtccttctcctgtcactggttatcaccctttactgcaaacggggcagaaagaaactcctgtatatattcaaacaaccatttatgagaccagtacaaactactcaagaggaagatggctgtagctgccgatttccagaagaagaagaaggaggatgtgaactgagagtgaagttcagcaggagcgcagacgcccccgcgtaccagcagggccagaaccagctctataacgagctcaatctaggacgaagagaggagtacgatgttttggacaagagacgtggccgggaccctgagatggggggaaagccgagaaggaagaaccctcaggaaggcctgtacaatgaactgcagaaagataagatggcggaggcctacagtgagattgggatgaaaggcgagcgccggaggggcaaggggcacgatggcctttaccagggtctcagtacagccaccaaggacacctacgacgcccttcacatgcaggccctgccccctcgcggctctggcgagggaaggggttccctgcttacttgcggcgacgtcgaagagaatcccggtccgatggccctcccagtaactgccctccttttgcccctcgcactccttcttcatgccgctcgccccaactgggtcaacgtgattagcgatttgaagaaaatcgaggaccttatacagtctatgcatattgacgctacactgtatactgagagtgatgtacacccgtcctgtaaggtaacggccatgaaatgctttcttctggagctccaggtcatcagcttggagtctggggacgcaagcatccacgatacggttgaaaacctcatcatccttgcgaacaactctctctcatctaatggaaacgttacagagagtgggtgtaaggagtgcgaagagttggaagaaaaaaacatcaaagaatttcttcaatccttcgttcacatagtgcaaatgttcattaacacgtccactaccacacccgccccgaggccacctacgccggcaccgactatcgccagtcaacccctctctctgcgccccgaggcttgccggcctgcggctggtggggcggtccacacccggggcctggattttgcgtgcgatatatacatctgggcacctcttgccggcacctgcggagtgctgcttctctcactcgttattacgctgtactgc

SEQ ID NO: 3807 - protein, 21 aa, synthetic construct
  REGION 1..21: note = Synthetic
MALPVTALLLPLALLLHAARP

SEQ ID NO: 3808 - protein, 21 aa, synthetic construct
  REGION 1..21: note = Synthetic
MALPVTALLLPLALLLHAARP

SEQ ID NO: 3809 - protein, 21 aa, synthetic construct
  REGION 1..21: note = Synthetic
MALPVTALLLPLALLLHAARP

SEQ ID NO: 3810 - protein, 21 aa, synthetic construct
  REGION 1..21: note = Synthetic
MALPVTALLLPLALLLHAARP

SEQ ID NO: 3811 - DNA, 63 bp, synthetic construct; identical to SEQ ID NO: 1374
  misc_feature 1..63: note = Synthetic
  source 1..63: mol_type = other DNA

SEQ ID NO: 3812 - DNA, 63 bp, synthetic construct; identical to SEQ ID NO: 1374
  misc_feature 1..63: note = Synthetic
  source 1..63: mol_type = other DNA

SEQ ID NO: 3813 - DNA, 63 bp, synthetic construct; identical to SEQ ID NO: 1374
  misc_feature 1..63: note = Synthetic
  source 1..63: mol_type = other DNA

SEQ ID NO: 3814 - DNA, 63 bp, synthetic construct; identical to SEQ ID NO: 1374
  misc_feature 1..63: note = Synthetic
  source 1..63: mol_type = other DNA

SEQ ID NO: 3815 - protein, 250 aa, synthetic construct; identical to SEQ ID NO: 1474
  REGION 1..250: note = Synthetic

SEQ ID NO: 3816 - protein, 244 aa, synthetic construct; identical to SEQ ID NO: 1476
  REGION 1..244: note = Synthetic

SEQ ID NO: 3817 - protein, 244 aa, synthetic construct; identical to SEQ ID NO: 1483
  REGION 1..244: note = Synthetic

SEQ ID NO: 3818 - protein, 248 aa, synthetic construct; identical to SEQ ID NO: 1498
  REGION 1..248: note = Synthetic

SEQ ID NO: 3819 - DNA, 750 bp, synthetic construct; identical to SEQ ID NO: 1500
  misc_feature 1..750: note = Synthetic
  source 1..750: mol_type = other DNA

SEQ ID NO: 3820 - DNA, 732 bp, synthetic construct; identical to SEQ ID NO: 1502
  misc_feature 1..732: note = Synthetic
  source 1..732: mol_type = other DNA

SEQ ID NO: 3821 - DNA, 732 bp, synthetic construct; identical to SEQ ID NO: 1509
  misc_feature 1..732: note = Synthetic
  source 1..732: mol_type = other DNA

SEQ ID NO: 3822 - DNA, 744 bp, synthetic construct; identical to SEQ ID NO: 1524
  misc_feature 1..744: note = Synthetic
  source 1..744: mol_type = other DNA

SEQ ID NO: 3823 - protein, 446 aa, synthetic construct; identical to SEQ ID NO: 2384
  REGION 1..446: note = Synthetic

SEQ ID NO: 3824 - protein, 446 aa, synthetic construct; identical to SEQ ID NO: 2384
  REGION 1..446: note = Synthetic

SEQ ID NO: 3825 - protein, 446 aa, synthetic construct; identical to SEQ ID NO: 2384
  REGION 1..446: note = Synthetic

SEQ ID NO: 3826 - protein, 446 aa, synthetic construct; identical to SEQ ID NO: 2384
  REGION 1..446: note = Synthetic

SEQ ID NO: 3827 - DNA, 1341 bp, synthetic construct; identical to SEQ ID NO: 2385
  misc_feature 1..1341: note = Synthetic
  source 1..1341: mol_type = other DNA

SEQ ID NO: 3828 - DNA, 1341 bp, synthetic construct; identical to SEQ ID NO: 2385
  misc_feature 1..1341: note = Synthetic
  source 1..1341: mol_type = other DNA

SEQ ID NO: 3829 - DNA, 1341 bp, synthetic construct; identical to SEQ ID NO: 2385
  misc_feature 1..1341: note = Synthetic
  source 1..1341: mol_type = other DNA

SEQ ID NO: 3830 - DNA, 1341 bp, synthetic construct; identical to SEQ ID NO: 2385
  misc_feature 1..1341: note = Synthetic
  source 1..1341: mol_type = other DNA

SEQ ID NO: 3831 - protein, 717 aa, synthetic construct
  REGION 1..717: note = Synthetic
MALPVTALLLPLALLLHAARPEIVLTQSPDFQSVTPKEKVTITCRASQSIGSSLHWYQQKPDQSPKLLIKFASQSFSGVPSRFSGSGSGTDFTLTIHSLEAEDAATYYCHQSSSLPWTFGQGTKVEIKGSTSGSGKPGSGEGSTKGQVQLVESGGGVVQPGRSLRLSCAASGFTFSNYDMHWVRQAPGKGLEWVTIIWHDASNKYYLDSVKGRFTISRDNSKNTLYLQMNSLRAEDTAVYYCARGDNWNDEHHYFYYMDVWGKGTTVTVSSAAATTTPAPRPPTPAPTIASQPLSLRPEACRPAAGGAVHTRGLDFACDIYIWAPLAGTCGVLLLSLVITLYCRRDQRLPPDAHKPPGGGSFRTPIQEEQADAHSTLAKIRVKFSRSADAPAYQQGQNQLYNELNLGRREEYDVLDKRRGRDPEMGGKPRRKNPQEGLYNELQKDKMAEAYSEIGMKGERRRGKGHDGLYQGLSTATKDTYDALHMQALPPRGSGEGRGSLLTCGDVEENPGPMALPVTALLLPLALLLHAARPNWVNVISDLKKIEDLIQSMHIDATLYTESDVHPSCKVTAMKCFLLELQVISLESGDASIHDTVENLIILANNSLSSNGNVTESGCKECEELEEKNIKEFLQSFVHIVQMFINTSTTTPAPRPPTPAPTIASQPLSLRPEACRPAAGGAVHTRGLDFACDIYIWAPLAGTCGVLLLSLVITLYC

SEQ ID NO: 3832 - protein, 711 aa, synthetic construct
  REGION 1..711: note = Synthetic
MALPVTALLLPLALLLHAARPQTVVTQEPSLSVSPGGTVTLTCGLSSGSVSTSYYPSWYQQTPGQAPRTLIYSTNIRSSGVPDRFSGSILGNKAALTITGAQADDESDYYCKLYMGSGIIFGSGTKVTVLGSTSGSGKPGSGEGSTKGEVQLLESGGGLVQPGGSLRLSCAASGFTFSIYAMSWVRQAPGKGLEWVSAISGGGDTTYYADSVKGRFTISRDNSKTTLDLQMNSLRAEDTAVYYCAKHTSYYMDVWGKGTTVTVSSAAATTTPAPRPPTPAPTIASQPLSLRPEACRPAAGGAVHTRGLDFACDIYIWAPLAGTCGVLLLSLVITLYCRRDQRLPPDAHKPPGGGSFRTPIQEEQADAHSTLAKIRVKFSRSADAPAYQQGQNQLYNELNLGRREEYDVLDKRRGRDPEMGGKPRRKNPQEGLYNELQKDKMAEAYSEIGMKGERRRGKGHDGLYQGLSTATKDTYDALHMQALPPRGSGEGRGSLLTCGDVEENPGPMALPVTALLLPLALLLHAARPNWVNVISDLKKIEDLIQSMHIDATLYTESDVHPSCKVTAMKCFLLELQVISLESGDASIHDTVENLIILANNSLSSNGNVTESGCKECEELEEKNIKEFLQSFVHIVQMFINTSTTTPAPRPPTPAPTIASQPLSLRPEACRPAAGGAVHTRGLDFACDIYIWAPLAGTCGVLLLSLVITLYC

SEQ ID NO: 3833 - protein, 711 aa, synthetic construct
  REGION 1..711: note = Synthetic
MALPVTALLLPLALLLHAARPQTVVTQEPSFSVSPGGTVTLTCALSSDSVSTSYFPSWYRQTPGQAPRTLIYNTNTRSSGVPDRFSGSILGNKAALTITGAQADDESDYYCVLYMGSGIIFGSGTKVTVLGSTSGSGKPGSGEGSTKGEVQLLESGGGLVQPGGSLRLSCAASGFTFSSFAMSWVRQAPGKGLEWVSAVSGSGDDTYYADSVKGRFTISRDNSKNTLYLQMNSLRAEDTAVYYCAKHTSYYLDVWGKGTTVTVSSAAATTTPAPRPPTPAPTIASQPLSLRPEACRPAAGGAVHTRGLDFACDIYIWAPLAGTCGVLLLSLVITLYCRRDQRLPPDAHKPPGGGSFRTPIQEEQADAHSTLAKIRVKFSRSADAPAYQQGQNQLYNELNLGRREEYDVLDKRRGRDPEMGGKPRRKNPQEGLYNELQKDKMAEAYSEIGMKGERRRGKGHDGLYQGLSTATKDTYDALHMQALPPRGSGEGRGSLLTCGDVEENPGPMALPVTALLLPLALLLHAARPNWVNVISDLKKIEDLIQSMHIDATLYTESDVHPSCKVTAMKCFLLELQVISLESGDASIHDTVENLIILANNSLSSNGNVTESGCKECEELEEKNIKEFLQSFVHIVQMFINTSTTTPAPRPPTPAPTIASQPLSLRPEACRPAAGGAVHTRGLDFACDIYIWAPLAGTCGVLLLSLVITLYC

SEQ ID NO: 3834 - protein, 715 aa, synthetic construct
  REGION 1..715: note = Synthetic
MALPVTALLLPLALLLHAARPEIVMTQSPATLSLSPGERATLSCRASQSVSSSYLSWYQQKPGLAPRLLIYGASTRATGIPARFSGSGSGTDFTLTISSLQPEDFAVYYCQQDYNLPPTFGQGTKVEIKGSTSGSGKPGSGEGSTKGEVQLLESGGDLVQPGGSLRLSCAASGFTFSTYAMTWVRQAPGKGLEWVSAISGTSGSTYYADSVKGRFTISRDNSKSTLYLHMNSLRTEDTAVYYCARGGYNWHYYYYMDVWGKGTTVTVSSAAATTTPAPRPPTPAPTIASQPLSLRPEACRPAAGGAVHTRGLDFACDIYIWAPLAGTCGVLLLSLVITLYCRRDQRLPPDAHKPPGGGSFRTPIQEEQADAHSTLAKIRVKFSRSADAPAYQQGQNQLYNELNLGRREEYDVLDKRRGRDPEMGGKPRRKNPQEGLYNELQKDKMAEAYSEIGMKGERRRGKGHDGLYQGLSTATKDTYDALHMQALPPRGSGEGRGSLLTCGDVEENPGPMALPVTALLLPLALLLHAARPNWVNVISDLKKIEDLIQSMHIDATLYTESDVHPSCKVTAMKCFLLELQVISLESGDASIHDTVENLIILANNSLSSNGNVTESGCKECEELEEKNIKEFLQSFVHIVQMFINTSTTTPAPRPPTPAPTIASQPLSLRPEACRPAAGGAVHTRGLDFACDIYIWAPLAGTCGVLLLSLVITLYC

SEQ ID NO: 3835 - DNA, 2154 bp, synthetic construct
  misc_feature 1..2154: note = Synthetic
  source 1..2154: mol_type = other DNA
atggccttaccagtgaccgccttgctcctgccgctggccttgctgctccacgccgccaggccggaaattgtgctgactcagtctccagactttcagtctgtgactccaaaggagaaagtcaccatcacctgccgggccagtcagagcattggtagtagcttacactggtaccagcagaaaccagatcagtctccaaagctcctcatcaagtttgcttcccagtccttctcaggggtcccctcgaggttcagtggcagtggatctgggacagatttcaccctcaccatccatagcctggaagctgaagatgctgcaacgtattactgtcatcagagtagtagtttaccgtggacgttcggccaagggaccaaggtggaaatcaaaggcagcaccagcggcagcggcaagcccggctccggagagggcagcaccaagggccaggtgcagctggtggagtctgggggaggcgtggtccagcctgggaggtccctgagactctcctgtgcagcgtctgggttcaccttcagtaactatgacatgcactgggtccgccaggccccaggcaaggggctggagtgggtgacaattatatggcatgatgcaagtaataaatattatttagactccgtgaagggccgattcaccatctccagagacaattccaagaacacgctgtatctgcaaatgaacagcctgagagccgaggacacggctgtgtattactgtgcgagaggtgacaactggaacgacgaacaccactacttctactacatggacgtctggggcaaagggaccacggtcaccgtctcctcagcggccgcaaccacgacgccagcgccgcggccaccaacaccggcgcccaccatcgcgtcgcagcccctgtccctgcgcccagaggcgtgccggccagcggcggggggcgcagtgcacacgagggggctggacttcgcctgtgatatctacatctgggcgcccttggccgggacttgtggggtccttctcctgtcactggttatcaccctttactgccggagggaccagaggctgccccccgatgcccacaagccccctgggggaggcagtttccggacccccatccaagaggagcaggccgacgcccactccaccctggccaagatcagagtgaagttcagcaggagcgcagacgcccccgcgtaccagcagggccagaaccagctctataacgagctcaatctaggacgaagagaggagtacgatgttttggacaagagacgtggccgggaccctgagatggggggaaagccgagaaggaagaaccctcaggaaggcctgtacaatgaactgcagaaagataagatggcggaggcctacagtgagattgggatgaaaggcgagcgccggaggggcaaggggcacgatggcctttaccagggtctcagtacagccaccaaggacacctacgacgcccttcacatgcaggccctgccccctcgcggctctggcgagggaaggggttccctgcttacttgcggcgacgtcgaagagaatcccggtccgatggccctcccagtaactgccctccttttgcccctcgcactccttcttcatgccgctcgccccaactgggtcaacgtgattagcgatttgaagaaaatcgaggaccttatacagtctatgcatattgacgctacactgtatactgagagtgatgtacacccgtcctgtaaggtaacggccatgaaatgctttcttctggagctccaggtcatcagcttggagtctggggacgcaagcatccacgatacggttgaaaacctcatcatccttgcgaacaactctctctcatctaatggaaacgttacagagagtgggtgtaaggagtgcgaagagttggaagaaaaaaacatcaaagaatttcttcaatccttcgttcacatagtgcaaatgttcattaacacgtccactaccacacccgccccgaggccacctacgccggcaccgactatcgccagtcaacccctctctctgcgccccgaggcttgccggcctgcggctggtggggcggtccacacccggggcctggattttgcgtgcgatatatacatctgggcacctcttgccggcacctgcggagtgctgcttctctcactcgttattacgctgtactgctaa

SEQ ID NO: 3836 - DNA, 2136 bp, synthetic construct
  misc_feature 1..2136: note = Synthetic
  source 1..2136: mol_type = other DNA
atggccttaccagtgaccgccttgctcctgccgctggccttgctgctccacgccgccaggccgcagactgtggtgacccaggagccatcgctctcagtgtcccctggagggacagtcacactcacttgtggcttgagctctggctcagtctctactagttactaccccagctggtaccagcagaccccaggccaggctccacgcacgctcatctacagcacaaatattcggtcttctggggtccctgatcgcttctctggctccatccttgggaacaaagctgccctcaccatcacgggggcccaggcagatgatgaatctgattattattgtaagctgtatatgggaagtggcattattttcggcagtggaaccaaggtcactgtcctaggcagcaccagcggcagcggcaagcccggctccggagagggcagcaccaagggcgaggtgcagctgctggagtctgggggaggcttggtacagcctggggggtccctgagactctcctgtgcagcctctggattcacctttagcatctatgccatgagctgggtccgccaggctccagggaaggggctggagtgggtctcagctattagtggtggtggtgataccacatactacgcagactccgtgaagggccggttcaccatctccagagacaattccaagaccacgctggatctgcaaatgaacagcctgagagccgaggacacggccgtatattactgtgcgaaacacactagctactacatggacgtctggggcaaagggaccacggtcaccgtctcctcagcggccgcaaccacgacgccagcgccgcggccaccaacaccggcgcccaccatcgcgtcgcagcccctgtccctgcgcccagaggcgtgccggccagcggcggggggcgcagtgcacacgagggggctggacttcgcctgtgatatctacatctgggcgcccttggccgggacttgtggggtccttctcctgtcactggttatcaccctttactgccggagggaccagaggctgccccccgatgcccacaagccccctgggggaggcagtttccggacccccatccaagaggagcaggccgacgcccactccaccctggccaagatcagagtgaagttcagcaggagcgcagacgcccccgcgtaccagcagggccagaaccagctctataacgagctcaatctaggacgaagagaggagtacgatgttttggacaagagacgtggccgggaccctgagatggggggaaagccgagaaggaagaaccctcaggaaggcctgtacaatgaactgcagaaagataagatggcggaggcctacagtgagattgggatgaaaggcgagcgccggaggggcaaggggcacgatggcctttaccagggtctcagtacagccaccaaggacacctacgacgcccttcacatgcaggccctgccccctcgcggctctggcgagggaaggggttccctgcttacttgcggcgacgtcgaagagaatcccggtccgatggccctcccagtaactgccctccttttgcccctcgcactccttcttcatgccgctcgccccaactgggtcaacgtgattagcgatttgaagaaaatcgaggaccttatacagtctatgcatattgacgctacactgtatactgagagtgatgtacacccgtcctgtaaggtaacggccatgaaatgctttcttctggagctccaggtcatcagcttggagtctggggacgcaagcatccacgatacggttgaaaacctcatcatccttgcgaacaactctctctcatctaatggaaacgttacagagagtgggtgtaaggagtgcgaagagttggaagaaaaaaacatcaaagaatttcttcaatccttcgttcacatagtgcaaatgttcattaacacgtccactaccacacccgccccgaggccacctacgccggcaccgactatcgccagtcaacccctctctctgcgccccgaggcttgccggcctgcggctggtggggcggtccacacccggggcctggattttgcgtgcgatatatacatctgggcacctcttgccggcacctgcggagtgctgcttctctcactcgttattacgctgtactgctaa

SEQ ID NO: 3837 - DNA, 2136 bp, synthetic construct
  misc_feature 1..2136: note = Synthetic
  source 1..2136: mol_type = other DNA
atggccttaccagtgaccgccttgctcctgccgctggccttgctgctccacgccgccaggccgcagactgtggtgacccaggagccatcgttctcagtgtcccctggagggacagtcacactcacttgtgccttgagctctgactcagtctctactagttactttcccagctggtaccggcagaccccaggccaggctccacgcacgctcatctacaacacaaacactcgctcttctggggtccctgatcgcttctctggctccatccttgggaacaaagctgccctcaccatcacgggggcccaggcagatgatgaatctgattattactgtgtgctatatatgggtagtggcattattttcggcagtggaaccaaggtcactgtcctaggcagcaccagcggcagcggcaagcccggctccggagagggcagcaccaagggcgaggtgcagttgttggagtctgggggaggcttggtacagcctggggggtccctgagactctcctgtgcagcctctggattcacctttagcagctttgccatgagctgggtccgccaggctccagggaaggggctggaatgggtctcagctgttagtggtagtggtgatgacacatactacgcagactccgtgaagggccggttcaccatctccagagacaattccaagaacacgctgtatctgcaaatgaacagcctgagagccgaggacacggccgtatattactgtgcgaaacacactagctactacctggacgtctggggcaaagggaccacggtcaccgtctcctcagcggccgcaaccacgacgccagcgccgcggccaccaacaccggcgcccaccatcgcgtcgcagcccctgtccctgcgcccagaggcgtgccggccagcggcggggggcgcagtgcacacgagggggctggacttcgcctgtgatatctacatctgggcgcccttggccgggacttgtggggtccttctcctgtcactggttatcaccctttactgccggagggaccagaggctgccccccgatgcccacaagccccctgggggaggcagtttccggacccccatccaagaggagcaggccgacgcccactccaccctggccaagatcagagtgaagttcagcaggagcgcagacgcccccgcgtaccagcagggccagaaccagctctataacgagctcaatctaggacgaagagaggagtacgatgttttggacaagagacgtggccgggaccctgagatggggggaaagccgagaaggaagaaccctcaggaaggcctgtacaatgaactgcagaaagataagatggcggaggcctacagtgagattgggatgaaaggcgagcgccggaggggcaaggggcacgatggcctttaccagggtctcagtacagccaccaaggacacctacgacgcccttcacatgcaggccctgccccctcgcggctctggcgagggaaggggttccctgcttacttgcggcgacgtcgaagagaatcccggtccgatggccctcccagtaactgccctccttttgcccctcgcactccttcttcatgccgctcgccccaactgggtcaacgtgattagcgatttgaagaaaatcgaggaccttatacagtctatgcatattgacgctacactgtatactgagagtgatgtacacccgtcctgtaaggtaacggccatgaaatgctttcttctggagctccaggtcatcagcttggagtctggggacgcaagcatccacgatacggttgaaaacctcatcatccttgcgaacaactctctctcatctaatggaaacgttacagagagtgggtgtaaggagtgcgaagagttggaagaaaaaaacatcaaagaatttcttcaatccttcgttcacatagtgcaaatgttcattaacacgtccactaccacacccgccccgaggccacctacgccggcaccgactatcgccagtcaacccctctctctgcgccccgaggcttgccggcctgcggctggtggggcggtccacacccggggcctggattttgcgtgcgatatatacatctgggcacctcttgccggcacctgcggagtgctgcttctctcactcgttattacgctgtactgctaa

SEQ ID NO: 3838 - DNA, 2148 bp, synthetic construct
  misc_feature 1..2148: note = Synthetic
  source 1..2148: mol_type = other DNA
atggccttaccagtgaccgccttgctcctgccgctggccttgctgctccacgccgccaggccggaaattgtaatgacacagtctccagccaccctgtctttgtctccaggggaaagagccaccctctcctgcagggccagtcagagtgttagcagcagctacttatcctggtaccagcagaaacctgggctggctcccaggctcctcatctatggtgcatccaccagggccactggcatcccagccaggttcagtggcagtgggtctgggacagacttcactctcaccatcagcagcctgcagcctgaagattttgcagtttattactgtcagcaggattataacttacctccgacgttcggccaagggaccaaggtggaaatcaaaggcagcaccagcggcagcggcaagcccggctccggagagggcagcaccaagggcgaggtgcagctgttggagtctgggggagacttggtacagcctggggggtccctgcgactctcctgtgcagcctctggattcacctttagcacctatgccatgacctgggtccgccaggctccagggaaggggctggagtgggtctcagctattagtggtactagtggtagcacatactacgcagactccgtgaagggccggttcaccatctccagagacaattccaagagcacgctgtatctgcacatgaacagcctgagaaccgaggacacggccgtatattactgtgcgagaggcggatataactggcactactactactacatggacgtctggggcaaagggaccacggtcaccgtctcctcagcggccgcaaccacgacgccagcgccgcggccaccaacaccggcgcccaccatcgcgtcgcagcccctgtccctgcgcccagaggcgtgccggccagcggcggggggcgcagtgcacacgagggggctggacttcgcctgtgatatctacatctgggcgcccttggccgggacttgtggggtccttctcctgtcactggttatcaccctttactgccggagggaccagaggctgccccccgatgcccacaagccccctgggggaggcagtttccggacccccatccaagaggagcaggccgacgcccactccaccctggccaagatcagagtgaagttcagcaggagcgcagacgcccccgcgtaccagcagggccagaaccagctctataacgagctcaatctaggacgaagagaggagtacgatgttttggacaagagacgtggccgggaccctgagatggggggaaagccgagaaggaagaaccctcaggaaggcctgtacaatgaactgcagaaagataagatggcggaggcctacagtgagattgggatgaaaggcgagcgccggaggggcaaggggcacgatggcctttaccagggtctcagtacagccaccaaggacacctacgacgcccttcacatgcaggccctgccccctcgcggctctggcgagggaaggggttccctgcttacttgcggcgacgtcgaagagaatcccggtccgatggccctcccagtaactgccctccttttgcccctcgcactccttcttcatgccgctcgccccaactgggtcaacgtgattagcgatttgaagaaaatcgaggaccttatacagtctatgcatattgacgctacactgtatactgagagtgatgtacacccgtcctgtaaggtaacggccatgaaatgctttcttctggagctccaggtcatcagcttggagtctggggacgcaagcatccacgatacggttgaaaacctcatcatccttgcgaacaactctctctcatctaatggaaacgttacagagagtgggtgtaaggagtgcgaagagttggaagaaaaaaacatcaaagaatttcttcaatccttcgttcacatagtgcaaatgttcattaacacgtccactaccacacccgccccgaggccacctacgccggcaccgactatcgccagtcaacccctctctctgcgccccgaggcttgccggcctgcggctggtggggcggtccacacccggggcctggattttgcgtgcgatatatacatctgggcacctcttgccggcacctgcggagtgctgcttctctcactcgttattacgctgtactgctaa

SEQ ID NO: 3839 - DNA, 63 bp, synthetic construct; identical to SEQ ID NO: 1374
  misc_feature 1..63: note = Synthetic
  source 1..63: mol_type = other DNA

SEQ ID NO: 3840 - DNA, 63 bp, synthetic construct; identical to SEQ ID NO: 1374
  misc_feature 1..63: note = Synthetic
  source 1..63: mol_type = other DNA

SEQ ID NO: 3841 - DNA, 63 bp, synthetic construct; identical to SEQ ID NO: 1374
  misc_feature 1..63: note = Synthetic
  source 1..63: mol_type = other DNA

SEQ ID NO: 3842 - DNA, 63 bp, synthetic construct; identical to SEQ ID NO: 1374
  misc_feature 1..63: note = Synthetic
  source 1..63: mol_type = other DNA

SEQ ID NO: 3843 - DNA, 750 bp, synthetic construct; identical to SEQ ID NO: 1500
  misc_feature 1..750: note = Synthetic
  source 1..750: mol_type = other DNA

SEQ ID NO: 3844 - DNA, 732 bp, synthetic construct; identical to SEQ ID NO: 1502
  misc_feature 1..732: note = Synthetic
  source 1..732: mol_type = other DNA

SEQ ID NO: 3845 - DNA, 732 bp, synthetic construct; identical to SEQ ID NO: 1509
  misc_feature 1..732: note = Synthetic
  source 1..732: mol_type = other DNA

SEQ ID NO: 3846 - DNA, 744 bp, synthetic construct; identical to SEQ ID NO: 1524
  misc_feature 1..744: note = Synthetic
  source 1..744: mol_type = other DNA

SEQ ID NO: 3847 - DNA, 1341 bp, synthetic construct; identical to SEQ ID NO: 2385
  misc_feature 1..1341: note = Synthetic
  source 1..1341: mol_type = other DNA

SEQ ID NO: 3848 - DNA, 1341 bp, synthetic construct; identical to SEQ ID NO: 2385
  misc_feature 1..1341: note = Synthetic
  source 1..1341: mol_type = other DNA

SEQ ID NO: 3849 - DNA, 1341 bp, synthetic construct; identical to SEQ ID NO: 2385
  misc_feature 1..1341: note = Synthetic
  source 1..1341: mol_type = other DNA

SEQ ID NO: 3850 - DNA, 1341 bp, synthetic construct; identical to SEQ ID NO: 2385
  misc_feature 1..1341: note = Synthetic
  source 1..1341: mol_type = other DNA

SEQ ID NO: 3851 - DNA, 2154 bp, synthetic construct; identical to SEQ ID NO: 3835
  misc_feature 1..2154: note = Synthetic
  source 1..2154: mol_type = other DNA

SEQ ID NO: 3852 - DNA, 2136 bp, synthetic construct; identical to SEQ ID NO: 3836
  misc_feature 1..2136: note = Synthetic
  source 1..2136: mol_type = other DNA

SEQ ID NO: 3853 - DNA, 2136 bp, synthetic construct; identical to SEQ ID NO: 3837
  misc_feature 1..2136: note = Synthetic
  source 1..2136: mol_type = other DNA

SEQ ID NO: 3854 - DNA, 2148 bp, synthetic construct; identical to SEQ ID NO: 3838
  misc_feature 1..2148: note = Synthetic
  source 1..2148: mol_type = other DNA

SEQ ID NO: 3855 - protein, 21 aa, synthetic construct
  REGION 1..21: note = Synthetic
MALPVTALLLPLALLLHAARP

SEQ ID NO: 3856 - protein, 21 aa, synthetic construct
  REGION 1..21: note = Synthetic
MALPVTALLLPLALLLHAARP

SEQ ID NO: 3857 - protein, 21 aa, synthetic construct
  REGION 1..21: note = Synthetic
MALPVTALLLPLALLLHAARP

SEQ ID NO: 3858 - protein, 21 aa, synthetic construct
  REGION 1..21: note = Synthetic
MALPVTALLLPLALLLHAARP

SEQ ID NO: 3859 - protein, 250 aa, synthetic construct; identical to SEQ ID NO: 1474
  REGION 1..250: note = Synthetic

SEQ ID NO: 3860 - protein, 244 aa, synthetic construct; identical to SEQ ID NO: 1476
  REGION 1..244: note = Synthetic

SEQ ID NO: 3861 - protein, 244 aa, synthetic construct; identical to SEQ ID NO: 1483
  REGION 1..244: note = Synthetic

SEQ ID NO: 3862 - protein, 248 aa, synthetic construct; identical to SEQ ID NO: 1498
  REGION 1..248: note = Synthetic

SEQ ID NO: 3863 - protein, 221 aa, synthetic construct; identical to SEQ ID NO: 2380
  REGION 1..221: note = Synthetic

SEQ ID NO: 3864 - protein, 221 aa, synthetic construct; identical to SEQ ID NO: 2380
  REGION 1..221: note = Synthetic

SEQ ID NO: 3865 - protein, 221 aa, synthetic construct; identical to SEQ ID NO: 2380
  REGION 1..221: note = Synthetic

SEQ ID NO: 3866 - protein, 221 aa, synthetic construct; identical to SEQ ID NO: 2380
  REGION 1..221: note = Synthetic

SEQ ID NO: 3867 - protein, 492 aa, synthetic construct
  REGION 1..492: note = Synthetic
MALPVTALLLPLALLLHAARPEIVLTQSPDFQSVTPKEKVTITCRASQSIGSSLHWYQQKPDQSPKLLIKFASQSFSGVPSRFSGSGSGTDFTLTIHSLEAEDAATYYCHQSSSLPWTFGQGTKVEIKGSTSGSGKPGSGEGSTKGQVQLVESGGGVVQPGRSLRLSCAASGFTFSNYDMHWVRQAPGKGLEWVTIIWHDASNKYYLDSVKGRFTISRDNSKNTLYLQMNSLRAEDTAVYYCARGDNWNDEHHYFYYMDVWGKGTTVTVSSAAATTTPAPRPPTPAPTIASQPLSLRPEACRPAAGGAVHTRGLDFACDIYIWAPLAGTCGVLLLSLVITLYCRRDQRLPPDAHKPPGGGSFRTPIQEEQADAHSTLAKIRVKFSRSADAPAYQQGQNQLYNELNLGRREEYDVLDKRRGRDPEMGGKPRRKNPQEGLYNELQKDKMAEAYSEIGMKGERRRGKGHDGLYQGLSTATKDTYDALHMQALPPR

SEQ ID NO: 3868 - protein, 486 aa, synthetic construct
  REGION 1..486: note = Synthetic
MALPVTALLLPLALLLHAARPQTVVTQEPSLSVSPGGTVTLTCGLSSGSVSTSYYPSWYQQTPGQAPRTLIYSTNIRSSGVPDRFSGSILGNKAALTITGAQADDESDYYCKLYMGSGIIFGSGTKVTVLGSTSGSGKPGSGEGSTKGEVQLLESGGGLVQPGGSLRLSCAASGFTFSIYAMSWVRQAPGKGLEWVSAISGGGDTTYYADSVKGRFTISRDNSKTTLDLQMNSLRAEDTAVYYCAKHTSYYMDVWGKGTTVTVSSAAATTTPAPRPPTPAPTIASQPLSLRPEACRPAAGGAVHTRGLDFACDIYIWAPLAGTCGVLLLSLVITLYCRRDQRLPPDAHKPPGGGSFRTPIQEEQADAHSTLAKIRVKFSRSADAPAYQQGQNQLYNELNLGRREEYDVLDKRRGRDPEMGGKPRRKNPQEGLYNELQKDKMAEAYSEIGMKGERRRGKGHDGLYQGLSTATKDTYDALHMQALPPR

SEQ ID NO: 3869 - protein, 486 aa, synthetic construct
  REGION 1..486: note = Synthetic
MALPVTALLLPLALLLHAARPQTVVTQEPSFSVSPGGTVTLTCALSSDSVSTSYFPSWYRQTPGQAPRTLIYNTNTRSSGVPDRFSGSILGNKAALTITGAQADDESDYYCVLYMGSGIIFGSGTKVTVLGSTSGSGKPGSGEGSTKGEVQLLESGGGLVQPGGSLRLSCAASGFTFSSFAMSWVRQAPGKGLEWVSAVSGSGDDTYYADSVKGRFTISRDNSKNTLYLQMNSLRAEDTAVYYCAKHTSYYLDVWGKGTTVTVSSAAATTTPAPRPPTPAPTIASQPLSLRPEACRPAAGGAVHTRGLDFACDIYIWAPLAGTCGVLLLSLVITLYCRRDQRLPPDAHKPPGGGSFRTPIQEEQADAHSTLAKIRVKFSRSADAPAYQQGQNQLYNELNLGRREEYDVLDKRRGRDPEMGGKPRRKNPQEGLYNELQKDKMAEAYSEIGMKGERRRGKGHDGLYQGLSTATKDTYDALHMQALPPR

SEQ ID NO: 3870 - protein, 490 aa, synthetic construct
  REGION 1..490: note = Synthetic
MALPVTALLLPLALLLHAARPEIVMTQSPATLSLSPGERATLSCRASQSVSSSYLSWYQQKPGLAPRLLIYGASTRATGIPARFSGSGSGTDFTLTISSLQPEDFAVYYCQQDYNLPPTFGQGTKVEIKGSTSGSGKPGSGEGSTKGEVQLLESGGDLVQPGGSLRLSCAASGFTFSTYAMTWVRQAPGKGLEWVSAISGTSGSTYYADSVKGRFTISRDNSKSTLYLHMNSLRTEDTAVYYCARGGYNWHYYYYMDVWGKGTTVTVSSAAATTTPAPRPPTPAPTIASQPLSLRPEACRPAAGGAVHTRGLDFACDIYIWAPLAGTCGVLLLSLVITLYCRRDQRLPPDAHKPPGGGSFRTPIQEEQADAHSTLAKIRVKFSRSADAPAYQQGQNQLYNELNLGRREEYDVLDKRRGRDPEMGGKPRRKNPQEGLYNELQKDKMAEAYSEIGMKGERRRGKGHDGLYQGLSTATKDTYDALHMQALPPR

SEQ ID NO: 3871 - DNA, 63 bp, synthetic construct; identical to SEQ ID NO: 1374
  misc_feature 1..63: note = Synthetic
  source 1..63: mol_type = other DNA

SEQ ID NO: 3872 - DNA, 63 bp, synthetic construct; identical to SEQ ID NO: 1374
  misc_feature 1..63: note = Synthetic
  source 1..63: mol_type = other DNA

SEQ ID NO: 3873 - DNA, 63 bp, synthetic construct; identical to SEQ ID NO: 1374
  misc_feature 1..63: note = Synthetic
  source 1..63: mol_type = other DNA

SEQ ID NO: 3874 - DNA, 63 bp, synthetic construct; identical to SEQ ID NO: 1374
  misc_feature 1..63: note = Synthetic
  source 1..63: mol_type = other DNA

SEQ ID NO: 3875 - DNA, 750 bp, synthetic construct; identical to SEQ ID NO: 1500
  misc_feature 1..750: note = Synthetic
  source 1..750: mol_type = other DNA

SEQ ID NO: 3876 - DNA, 732 bp, synthetic construct; identical to SEQ ID NO: 1502
  misc_feature 1..732: note = Synthetic
  source 1..732: mol_type = other DNA

SEQ ID NO: 3877 - DNA, 732 bp, synthetic construct; identical to SEQ ID NO: 1509
  misc_feature 1..732: note = Synthetic
  source 1..732: mol_type = other DNA

SEQ ID NO: 3878 - DNA, 744 bp, synthetic construct; identical to SEQ ID NO: 1524
  misc_feature 1..744: note = Synthetic
  source 1..744: mol_type = other DNA

SEQ ID NO: 3879 - DNA, 663 bp, synthetic construct; identical to SEQ ID NO: 2381
  misc_feature 1..663: note = Synthetic
  source 1..663: mol_type = other DNA

SEQ ID NO: 3880 - DNA, 663 bp, synthetic construct; identical to SEQ ID NO: 2381
  misc_feature 1..663: note = Synthetic
  source 1..663: mol_type = other DNA

SEQ ID NO: 3881 - DNA, 663 bp, synthetic construct; identical to SEQ ID NO: 2381
  misc_feature 1..663: note = Synthetic
  source 1..663: mol_type = other DNA

SEQ ID NO: 3882 - DNA, 663 bp, synthetic construct; identical to SEQ ID NO: 2381
  misc_feature 1..663: note = Synthetic
  source 1..663: mol_type = other DNA

SEQ ID NO: 3883 - DNA, 1476 bp, synthetic construct
  misc_feature 1..1476: note = Synthetic
  source 1..1476: mol_type = other DNA
atggccttaccagtgaccgccttgctcctgccgctggccttgctgctccacgccgccaggccggaaattgtgctgactcagtctccagactttcagtctgtgactccaaaggagaaagtcaccatcacctgccgggccagtcagagcattggtagtagcttacactggtaccagcagaaaccagatcagtctccaaagctcctcatcaagtttgcttcccagtccttctcaggggtcccctcgaggttcagtggcagtggatctgggacagatttcaccctcaccatccatagcctggaagctgaagatgctgcaacgtattactgtcatcagagtagtagtttaccgtggacgttcggccaagggaccaaggtggaaatcaaaggcagcaccagcggcagcggcaagcccggctccggagagggcagcaccaagggccaggtgcagctggtggagtctgggggaggcgtggtccagcctgggaggtccctgagactctcctgtgcagcgtctgggttcaccttcagtaactatgacatgcactgggtccgccaggccccaggcaaggggctggagtgggtgacaattatatggcatgatgcaagtaataaatattatttagactccgtgaagggccgattcaccatctccagagacaattccaagaacacgctgtatctgcaaatgaacagcctgagagccgaggacacggctgtgtattactgtgcgagaggtgacaactggaacgacgaacaccactacttctactacatggacgtctggggcaaagggaccacggtcaccgtctcctcagcggccgcaaccacgacgccagcgccgcggccaccaacaccggcgcccaccatcgcgtcgcagcccctgtccctgcgcccagaggcgtgccggccagcggcggggggcgcagtgcacacgagggggctggacttcgcctgtgatatctacatctgggcgcccttggccgggacttgtggggtccttctcctgtcactggttatcaccctttactgccggagggaccagaggctgccccccgatgcccacaagccccctgggggaggcagtttccggacccccatccaagaggagcaggccgacgcccactccaccctggccaagatcagagtgaagttcagcaggagcgcagacgcccccgcgtaccagcagggccagaaccagctctataacgagctcaatctaggacgaagagaggagtacgatgttttggacaagagacgtggccgggaccctgagatggggggaaagccgagaaggaagaaccctcaggaaggcctgtacaatgaactgcagaaagataagatggcggaggcctacagtgagattgggatgaaaggcgagcgccggaggggcaaggggcacgatggcctttaccagggtctcagtacagccaccaaggacacctacgacgcccttcacatgcaggccctgccccctcgc

SEQ ID NO: 3884 - DNA, 1458 bp, synthetic construct
  misc_feature 1..1458: note = Synthetic
  source 1..1458: mol_type = other DNA
atggccttaccagtgaccgccttgctcctgccgctggccttgctgctccacgccgccaggccgcagactgtggtgacccaggagccatcgctctcagtgtcccctggagggacagtcacactcacttgtggcttgagctctggctcagtctctactagttactaccccagctggtaccagcagaccccaggccaggctccacgcacgctcatctacagcacaaatattcggtcttctggggtccctgatcgcttctctggctccatccttgggaacaaagctgccctcaccatcacgggggcccaggcagatgatgaatctgattattattgtaagctgtatatgggaagtggcattattttcggcagtggaaccaaggtcactgtcctaggcagcaccagcggcagcggcaagcccggctccggagagggcagcaccaagggcgaggtgcagctgctggagtctgggggaggcttggtacagcctggggggtccctgagactctcctgtgcagcctctggattcacctttagcatctatgccatgagctgggtccgccaggctccagggaaggggctggagtgggtctcagctattagtggtggtggtgataccacatactacgcagactccgtgaagggccggttcaccatctccagagacaattccaagaccacgctggatctgcaaatgaacagcctgagagccgaggacacggccgtatattactgtgcgaaacacactagctactacatggacgtctggggcaaagggaccacggtcaccgtctcctcagcggccgcaaccacgacgccagcgccgcggccaccaacaccggcgcccaccatcgcgtcgcagcccctgtccctgcgcccagaggcgtgccggccagcggcggggggcgcagtgcacacgagggggctggacttcgcctgtgatatctacatctgggcgcccttggccgggacttgtggggtccttctcctgtcactggttatcaccctttactgccggagggaccagaggctgccccccgatgcccacaagccccctgggggaggcagtttccggacccccatccaagaggagcaggccgacgcccactccaccctggccaagatcagagtgaagttcagcaggagcgcagacgcccccgcgtaccagcagggccagaaccagctctataacgagctcaatctaggacgaagagaggagtacgatgttttggacaagagacgtggccgggaccctgagatggggggaaagccgagaaggaagaaccctcaggaaggcctgtacaatgaactgcagaaagataagatggcggaggcctacagtgagattgggatgaaaggcgagcgccggaggggcaaggggcacgatggcctttaccagggtctcagtacagccaccaaggacacctacgacgcccttcacatgcaggccctgccccctcgc

SEQ ID NO: 3885 - DNA, 1458 bp, synthetic construct
  misc_feature 1..1458: note = Synthetic
  source 1..1458: mol_type = other DNA
atggccttaccagtgaccgccttgctcctgccgctggccttgctgctccacgccgccaggccgcagactgtggtgacccaggagccatcgttctcagtgtcccctggagggacagtcacactcacttgtgccttgagctctgactcagtctctactagttactttcccagctggtaccggcagaccccaggccaggctccacgcacgctcatctacaacacaaacactcgctcttctggggtccctgatcgcttctctggctccatccttgggaacaaagctgccctcaccatcacgggggcccaggcagatgatgaatctgattattactgtgtgctatatatgggtagtggcattattttcggcagtggaaccaaggtcactgtcctaggcagcaccagcggcagcggcaagcccggctccggagagggcagcaccaagggcgaggtgcagttgttggagtctgggggaggcttggtacagcctggggggtccctgagactctcctgtgcagcctctggattcacctttagcagctttgccatgagctgggtccgccaggctccagggaaggggctggaatgggtctcagctgttagtggtagtggtgatgacacatactacgcagactccgtgaagggccggttcaccatctccagagacaattccaagaacacgctgtatctgcaaatgaacagcctgagagccgaggacacggccgtatattactgtgcgaaacacactagctactacctggacgtctggggcaaagggaccacggtcaccgtctcctcagcggccgcaaccacgacgccagcgccgcggccaccaacaccggcgcccaccatcgcgtcgcagcccctgtccctgcgcccagaggcgtgccggccagcggcggggggcgcagtgcacacgagggggctggacttcgcctgtgatatctacatctgggcgcccttggccgggacttgtggggtccttctcctgtcactggttatcaccctttactgccggagggaccagaggctgccccccgatgcccacaagccccctgggggaggcagtttccggacccccatccaagaggagcaggccgacgcccactccaccctggccaagatcagagtgaagttcagcaggagcgcagacgcccccgcgtaccagcagggccagaaccagctctataacgagctcaatctaggacgaagagaggagtacgatgttttggacaagagacgtggccgggaccctgagatggggggaaagccgagaaggaagaaccctcaggaaggcctgtacaatgaactgcagaaagataagatggcggaggcctacagtgagattgggatgaaaggcgagcgccggaggggcaaggggcacgatggcctttaccagggtctcagtacagccaccaaggacacctacgacgcccttcacatgcaggccctgccccctcgc

SEQ ID NO: 3886 - DNA, 1470 bp, synthetic construct
  misc_feature 1..1470: note = Synthetic
  source 1..1470: mol_type = other DNA
atggccttaccagtgaccgccttgctcctgccgctggccttgctgctccacgccgccaggccggaaattgtaatgacacagtctccagccaccctgtctttgtctccaggggaaagagccaccctctcctgcagggccagtcagagtgttagcagcagctacttatcctggtaccagcagaaacctgggctggctcccaggctcctcatctatggtgcatccaccagggccactggcatcccagccaggttcagtggcagtgggtctgggacagacttcactctcaccatcagcagcctgcagcctgaagattttgcagtttattactgtcagcaggattataacttacctccgacgttcggccaagggaccaaggtggaaatcaaaggcagcaccagcggcagcggcaagcccggctccggagagggcagcaccaagggcgaggtgcagctgttggagtctgggggagacttggtacagcctggggggtccctgcgactctcctgtgcagcctctggattcacctttagcacctatgccatgacctgggtccgccaggctccagggaaggggctggagtgggtctcagctattagtggtactagtggtagcacatactacgcagactccgtgaagggccggttcaccatctccagagacaattccaagagcacgctgtatctgcacatgaacagcctgagaaccgaggacacggccgtatattactgtgcgagaggcggatataactggcactactactactacatggacgtctggggcaaagggaccacggtcaccgtctcctcagcggccgcaaccacgacgccagcgccgcggccaccaacaccggcgcccaccatcgcgtcgcagcccctgtccctgcgcccagaggcgtgccggccagcggcggggggcgcagtgcacacgagggggctggacttcgcctgtgatatctacatctgggcgcccttggccgggacttgtggggtccttctcctgtcactggttatcaccctttactgccggagggaccagaggctgccccccgatgcccacaagccccctgggggaggcagtttccggacccccatccaagaggagcaggccgacgcccactccaccctggccaagatcagagtgaagttcagcaggagcgcagacgcccccgcgtaccagcagggccagaaccagctctataacgagctcaatctaggacgaagagaggagtacgatgttttggacaagagacgtggccgggaccctgagatggggggaaagccgagaaggaagaaccctcaggaaggcctgtacaatgaactgcagaaagataagatggcggaggcctacagtgagattgggatgaaaggcgagcgccggaggggcaaggggcacgatggcctttaccagggtctcagtacagccaccaaggacacctacgacgcccttcacatgcaggccctgccccctcgc

SEQ ID NO: 3887 - protein, 486 aa, synthetic construct; identical to SEQ ID NO: 749
  REGION 1..486: note = Synthetic

SEQ ID NO: 3888 - protein, 486 aa, synthetic construct; identical to SEQ ID NO: 750
  REGION 1..486: note = Synthetic

SEQ ID NO: 3889 - protein, 486 aa, synthetic construct; identical to SEQ ID NO: 751
  REGION 1..486: note = Synthetic

SEQ ID NO: 3890 - protein, 480 aa, synthetic construct; identical to SEQ ID NO: 752
  REGION 1..480: note = Synthetic

SEQ ID NO: 3891 - protein, 486 aa, synthetic construct; identical to SEQ ID NO: 753
  REGION 1..486: note = Synthetic

SEQ ID NO: 3892 - protein, 484 aa, synthetic construct; identical to SEQ ID NO: 754
  REGION 1..484: note = Synthetic

SEQ ID NO: 3893 - protein, 480 aa, synthetic construct; identical to SEQ ID NO: 755
  REGION 1..480: note = Synthetic

SEQ ID NO: 3894 - protein, 480 aa, synthetic construct; identical to SEQ ID NO: 756
  REGION 1..480: note = Synthetic

SEQ ID NO: 3895 - protein, 480 aa, synthetic construct; identical to SEQ ID NO: 757
  REGION 1..480: note = Synthetic

SEQ ID NO: 3896 - protein, 486 aa, synthetic construct; identical to SEQ ID NO: 758
  REGION 1..486: note = Synthetic

SEQ ID NO: 3897 - protein, 480 aa, synthetic construct; identical to SEQ ID NO: 759
  REGION 1..480: note = Synthetic

SEQ ID NO: 3898 - protein, 486 aa, synthetic construct; identical to SEQ ID NO: 760
  REGION 1..486: note = Synthetic

SEQ ID NO: 3899 - protein, 491 aa, synthetic construct; identical to SEQ ID NO: 761
  REGION 1..491: note = Synthetic

SEQ ID NO: 3900 - protein, 478 aa, synthetic construct; identical to SEQ ID NO: 762
  REGION 1..478: note = Synthetic

SEQ ID NO: 3901 - protein, 486 aa, synthetic construct; identical to SEQ ID NO: 763
  REGION 1..486: note = Synthetic

SEQ ID NO: 3902 - protein, 486 aa, synthetic construct; identical to SEQ ID NO: 764
  REGION 1..486: note = Synthetic

SEQ ID NO: 3903 - protein, 482 aa, synthetic construct; identical to SEQ ID NO: 765
  REGION 1..482: note = Synthetic

SEQ ID NO: 3904 - protein, 490 aa, synthetic construct; identical to SEQ ID NO: 766
  REGION 1..490: note = Synthetic

SEQ ID NO: 3905 - protein, 484 aa, synthetic construct; identical to SEQ ID NO: 767
  REGION 1..484: note = Synthetic

SEQ ID NO: 3906 - protein, 483 aa, synthetic construct; identical to SEQ ID NO: 768
  REGION 1..483: note = Synthetic

SEQ ID NO: 3907 - protein, 487 aa, synthetic construct; identical to SEQ ID NO: 769
  REGION 1..487: note = Synthetic

SEQ ID NO: 3908 - protein, 487 aa, synthetic construct; identical to SEQ ID NO: 770
  REGION 1..487: note = Synthetic

SEQ ID NO: 3909 - protein, 484 aa, synthetic construct; identical to SEQ ID NO: 771
  REGION 1..484: note = Synthetic

SEQ ID NO: 3910 - protein, 484 aa, synthetic construct; identical to SEQ ID NO: 772
  REGION 1..484: note = Synthetic

SEQ ID NO: 3911 - protein, 483 aa, synthetic construct; identical to SEQ ID NO: 773
  REGION 1..483: note = Synthetic

SEQ ID NO: 3912 - protein, 484 aa, synthetic construct; identical to SEQ ID NO: 774
  REGION 1..484: note = Synthetic

SEQ ID NO: 3913 - DNA, 1460 bp, synthetic construct; identical to SEQ ID NO: 775
  misc_feature 1..1460: note = Synthetic
  source 1..1460: mol_type = other DNA

SEQ ID NO: 3914 - DNA, 1460 bp, synthetic construct; identical to SEQ ID NO: 776
  misc_feature 1..1460: note = Synthetic
  source 1..1460: mol_type = other DNA

SEQ ID NO: 3915 - DNA, 1460 bp, synthetic construct; identical to SEQ ID NO: 777
  misc_feature 1..1460: note = Synthetic
  source 1..1460: mol_type = other DNA

SEQ ID NO: 3916 - DNA, 1442 bp, synthetic construct; identical to SEQ ID NO: 778
  misc_feature 1..1442: note = Synthetic
  source 1..1442: mol_type = other DNA

SEQ ID NO: 3917 - DNA, 1460 bp, synthetic construct; identical to SEQ ID NO: 779
  misc_feature 1..1460: note = Synthetic
  source 1..1460: mol_type = other DNA

SEQ ID NO: 3918 - DNA, 1454 bp, synthetic construct; identical to SEQ ID NO: 780
  misc_feature 1..1454: note = Synthetic
  source 1..1454: mol_type = other DNA

SEQ ID NO: 3919 - DNA, 1442 bp, synthetic construct; identical to SEQ ID NO: 781
  misc_feature 1..1442: note = Synthetic
  source 1..1442: mol_type = other DNA

SEQ ID NO: 3920 - DNA, 1442 bp, synthetic construct; identical to SEQ ID NO: 782
  misc_feature 1..1442: note = Synthetic
  source 1..1442: mol_type = other DNA

SEQ ID NO: 3921 - DNA, 1442 bp, synthetic construct; identical to SEQ ID NO: 783
  misc_feature 1..1442: note = Synthetic
  source 1..1442: mol_type = other DNA

SEQ ID NO: 3922 - DNA, 1460 bp, synthetic construct; identical to SEQ ID NO: 784
  misc_feature 1..1460: note = Synthetic
  source 1..1460: mol_type = other DNA

SEQ ID NO: 3923 - DNA, 1442 bp, synthetic construct; identical to SEQ ID NO: 785
  misc_feature 1..1442: note = Synthetic
  source 1..1442: mol_type = other DNA

SEQ ID NO: 3924 - DNA, 1460 bp, synthetic construct; identical to SEQ ID NO: 786
  misc_feature 1..1460: note = Synthetic
  source 1..1460: mol_type = other DNA

SEQ ID NO: 3925 - DNA, 1475 bp, synthetic construct; identical to SEQ ID NO: 787
  misc_feature 1..1475: note = Synthetic
  source 1..1475: mol_type = other DNA

SEQ ID NO: 3926 - DNA, 1436 bp, synthetic construct; identical to SEQ ID NO: 788
  misc_feature 1..1436: note = Synthetic
  source 1..1436: mol_type = other DNA

SEQ ID NO: 3927 - DNA, 1460 bp, synthetic construct; identical to SEQ ID NO: 789
  misc_feature 1..1460: note = Synthetic
  source 1..1460: mol_type = other DNA

SEQ ID NO: 3928 - DNA, 1460 bp, synthetic construct; identical to SEQ ID NO: 790
  misc_feature 1..1460: note = Synthetic
  source 1..1460: mol_type = other DNA

SEQ ID NO: 3929 - DNA, 1448 bp, synthetic construct; identical to SEQ ID NO: 791
  misc_feature 1..1448: note = Synthetic
  source 1..1448: mol_type = other DNA

SEQ ID NO: 3930 - DNA, 1472 bp, synthetic construct; identical to SEQ ID NO: 792
  misc_feature 1..1472: note = Synthetic
  source 1..1472: mol_type = other DNA

SEQ ID NO: 3931 - DNA, 1454 bp, synthetic construct; identical to SEQ ID NO: 793
  misc_feature 1..1454: note = Synthetic
  source 1..1454: mol_type = other DNA

SEQ ID NO: 3932 - DNA, 1451 bp, synthetic construct; identical to SEQ ID NO: 794
  misc_feature 1..1451: note = Synthetic
  source 1..1451: mol_type = other DNA

SEQ ID NO: 3933 - DNA, 1463 bp, synthetic construct; identical to SEQ ID NO: 795
  misc_feature 1..1463: note = Synthetic
  source 1..1463: mol_type = other DNA

SEQ ID NO: 3934 - DNA, 1463 bp, synthetic construct; identical to SEQ ID NO: 796
  misc_feature 1..1463: note = Synthetic
  source 1..1463: mol_type = other DNA

SEQ ID NO: 3935 - DNA, 1454 bp, synthetic construct; identical to SEQ ID NO: 797
  misc_feature 1..1454: note = Synthetic
  source 1..1454: mol_type = other DNA

SEQ ID NO: 3936 - DNA, 1454 bp, synthetic construct; identical to SEQ ID NO: 798
  misc_feature 1..1454: note = Synthetic
  source 1..1454: mol_type = other DNA

SEQ ID NO: 3937 - DNA, 1451 bp, synthetic construct; identical to SEQ ID NO: 799
  misc_feature 1..1451: note = Synthetic
  source 1..1451: mol_type = other DNA

SEQ ID NO: 3938 - DNA, 1454 bp, synthetic construct; identical to SEQ ID NO: 800
  misc_feature 1..1454: note = Synthetic
  source 1..1454: mol_type = other DNA

SEQ ID NO: 3939 - DNA, 1460 bp, synthetic construct; identical to SEQ ID NO: 801
  misc_feature 1..1460: note = Synthetic
  source 1..1460: mol_type = other DNA

SEQ ID NO: 3940 - DNA, 1460 bp, synthetic construct; identical to SEQ ID NO: 802
  misc_feature 1..1460: note = Synthetic
  source 1..1460: mol_type = other DNA

SEQ ID NO: 3941 - DNA, 1460 bp, synthetic construct; identical to SEQ ID NO: 803
  misc_feature 1..1460: note = Synthetic
  source 1..1460: mol_type = other DNA

SEQ ID NO: 3942 - DNA, 1442 bp, synthetic construct; identical to SEQ ID NO: 804
  misc_feature 1..1442: note = Synthetic
  source 1..1442: mol_type = other DNA

SEQ ID NO: 3943 - DNA, 1460 bp, synthetic construct; identical to SEQ ID NO: 805
  misc_feature 1..1460: note = Synthetic
  source 1..1460: mol_type = other DNA

SEQ ID NO: 3944 - DNA, 1454 bp, synthetic construct; identical to SEQ ID NO: 806
  misc_feature 1..1454: note = Synthetic
  source 1..1454: mol_type = other DNA

SEQ ID NO: 3945 - DNA, 1442 bp, synthetic construct; identical to SEQ ID NO: 807
  misc_feature 1..1442: note = Synthetic
  source 1..1442: mol_type = other DNA

SEQ ID NO: 3946 - DNA, 1442 bp, synthetic construct; identical to SEQ ID NO: 808
  misc_feature 1..1442: note = Synthetic
  source 1..1442: mol_type = other DNA

SEQ ID NO: 3947 - DNA, 1442 bp, synthetic construct; identical to SEQ ID NO: 809
  misc_feature 1..1442: note = Synthetic
  source 1..1442: mol_type = other DNA

SEQ ID NO: 3948 - DNA, 1460 bp, synthetic construct; identical to SEQ ID NO: 810
  misc_feature 1..1460: note = Synthetic
  source 1..1460: mol_type = other DNA

SEQ ID NO: 3949 - DNA, 1442 bp, synthetic construct; identical to SEQ ID NO: 811
  misc_feature 1..1442: note = Synthetic
  source 1..1442: mol_type = other DNA

SEQ ID NO: 3950 - DNA, 1460 bp, synthetic construct; identical to SEQ ID NO: 812
  misc_feature 1..1460: note = Synthetic
  source 1..1460: mol_type = other DNA

SEQ ID NO: 3951 - DNA, 1475 bp, synthetic construct; identical to SEQ ID NO: 813
  misc_feature 1..1475: note = Synthetic
  source 1..1475: mol_type = other DNA

SEQ ID NO: 3952 - DNA, 1436 bp, synthetic construct; identical to SEQ ID NO: 814
  misc_feature 1..1436: note = Synthetic
  source 1..1436: mol_type = other DNA

SEQ ID NO: 3953 - DNA, 1460 bp, synthetic construct; identical to SEQ ID NO: 815
  misc_feature 1..1460: note = Synthetic
  source 1..1460: mol_type = other DNA

SEQ ID NO: 3954 - DNA, 1460 bp, synthetic construct; identical to SEQ ID NO: 816
  misc_feature 1..1460: note = Synthetic
  source 1..1460: mol_type = other DNA

SEQ ID NO: 3955 - DNA, 1448 bp, synthetic construct; identical to SEQ ID NO: 817
  misc_feature 1..1448: note = Synthetic
  source 1..1448: mol_type = other DNA

SEQ ID NO: 3956 - DNA, 1472 bp, synthetic construct; identical to SEQ ID NO: 818
  misc_feature 1..1472: note = Synthetic
  source 1..1472: mol_type = other DNA

SEQ ID NO: 3957 - DNA, 1454 bp, synthetic construct; identical to SEQ ID NO: 819
  misc_feature 1..1454: note = Synthetic
  source 1..1454: mol_type = other DNA

SEQ ID NO: 3958 - DNA, 1451 bp, synthetic construct; identical to SEQ ID NO: 820
  misc_feature 1..1451: note = Synthetic
  source 1..1451: mol_type = other DNA

SEQ ID NO: 3959 - DNA, 1463 bp, synthetic construct; identical to SEQ ID NO: 821
  misc_feature 1..1463: note = Synthetic
  source 1..1463: mol_type = other DNA

SEQ ID NO: 3960 - DNA, 1463 bp, synthetic construct; identical to SEQ ID NO: 822
  misc_feature 1..1463: note = Synthetic
  source 1..1463: mol_type = other DNA

SEQ ID NO: 3961 - DNA, 1454 bp, synthetic construct; identical to SEQ ID NO: 823
  misc_feature 1..1454: note = Synthetic
  source 1..1454: mol_type = other DNA

SEQ ID NO: 3962 - DNA, 1454 bp, synthetic construct; identical to SEQ ID NO: 824
  misc_feature 1..1454: note = Synthetic
  source 1..1454: mol_type = other DNA

SEQ ID NO: 3963 - DNA, 1451 bp, synthetic construct; identical to SEQ ID NO: 825
  misc_feature 1..1451: note = Synthetic
  source 1..1451: mol_type = other DNA

SEQ ID NO: 3964 - DNA, 1454 bp, synthetic construct; identical to SEQ ID NO: 826
  misc_feature 1..1454: note = Synthetic
  source 1..1454: mol_type = other DNA

SEQ ID NO: 3965 - protein, 711 aa, synthetic construct; identical to SEQ ID NO: 827
  REGION 1..711: note = Synthetic

SEQ ID NO: 3966 - protein, 711 aa, synthetic construct; identical to SEQ ID NO: 828
  REGION 1..711: note = Synthetic

SEQ ID NO: 3967 - protein, 711 aa, synthetic construct; identical to SEQ ID NO: 829
  REGION 1..711: note = Synthetic

SEQ ID NO: 3968 - protein, 705 aa, synthetic construct; identical to SEQ ID NO: 830
  REGION 1..705: note = Synthetic

SEQ ID NO: 3969 - protein, 711 aa, synthetic construct; identical to SEQ ID NO: 831
  REGION 1..711: note = Synthetic

SEQ ID NO: 3970 - protein, 709 aa, synthetic construct; identical to SEQ ID NO: 832
  REGION 1..709: note = Synthetic

SEQ ID NO: 3971 - protein, 705 aa, synthetic construct; identical to SEQ ID NO: 833
  REGION 1..705: note = Synthetic

SEQ ID NO: 3972 - protein, 705 aa, synthetic construct; identical to SEQ ID NO: 834
  REGION 1..705: note = Synthetic

SEQ ID NO: 3973 - protein, 705 aa, synthetic construct; identical to SEQ ID NO: 835
  REGION 1..705: note = Synthetic

SEQ ID NO: 3974 - protein, 711 aa, synthetic construct; identical to SEQ ID NO: 836
  REGION 1..711: note = Synthetic

SEQ ID NO: 3975 - protein, 705 aa, synthetic construct; identical to SEQ ID NO: 837
  REGION 1..705: note = Synthetic

SEQ ID NO: 3976 - protein, 711 aa, synthetic construct; identical to SEQ ID NO: 838
  REGION 1..711: note = Synthetic

SEQ ID NO: 3977 - protein, 716 aa, synthetic construct; identical to SEQ ID NO: 839
  REGION 1..716: note = Synthetic

SEQ ID NO: 3978 - protein, 703 aa, synthetic construct; identical to SEQ ID NO: 840
  REGION 1..703: note = Synthetic

SEQ ID NO: 3979 - protein, 711 aa, synthetic construct; identical to SEQ ID NO: 841
  REGION 1..711: note = Synthetic

SEQ ID NO: 3980 - protein, 711 aa, synthetic construct; identical to SEQ ID NO: 842
  REGION 1..711: note = Synthetic

SEQ ID NO: 3981 - protein, 707 aa, synthetic construct; identical to SEQ ID NO: 843
  REGION 1..707: note = Synthetic

SEQ ID NO: 3982 - protein, 715 aa, synthetic construct; identical to SEQ ID NO: 844
  REGION 1..715: note = Synthetic

SEQ ID NO: 3983 - protein, 709 aa, synthetic construct; identical to SEQ ID NO: 845
  REGION 1..709: note = Synthetic

SEQ ID NO: 3984 - protein, 708 aa, synthetic construct; identical to SEQ ID NO: 846
  REGION 1..708: note = Synthetic

SEQ ID NO: 3985 - protein, 712 aa, synthetic construct; identical to SEQ ID NO: 847
  REGION 1..712: note = Synthetic

SEQ ID NO: 3986 - protein, 712 aa, synthetic construct; identical to SEQ ID NO: 848
  REGION 1..712: note = Synthetic

SEQ ID NO: 3987 - protein, 709 aa, synthetic construct; identical to SEQ ID NO: 849
  REGION 1..709: note = Synthetic

SEQ ID NO: 3988 - protein, 709 aa, synthetic construct; identical to SEQ ID NO: 850
  REGION 1..709: note = Synthetic

SEQ ID NO: 3989 - protein, 708 aa, synthetic construct; identical to SEQ ID NO: 851
  REGION 1..708: note = Synthetic

SEQ ID NO: 3990 - protein, 709 aa, synthetic construct; identical to SEQ ID NO: 852
  REGION 1..709: note = Synthetic

SEQ ID NO: 3991 - DNA, 2136 bp, synthetic construct; identical to SEQ ID NO: 853
  misc_feature 1..2136: note = Synthetic
  source 1..2136: mol_type = other DNA

SEQ ID NO: 3992 - DNA, 2136 bp, synthetic construct; identical to SEQ ID NO: 854
  misc_feature 1..2136: note = Synthetic
  source 1..2136: mol_type = other DNA

SEQ ID NO: 3993 - DNA, 2136 bp, synthetic construct; identical to SEQ ID NO: 855
  misc_feature 1..2136: note = Synthetic
  source 1..2136: mol_type = other DNA

SEQ ID NO: 3994 - DNA, 2118 bp, synthetic construct; identical to SEQ ID NO: 856
  misc_feature 1..2118: note = Synthetic
  source 1..2118: mol_type = other DNA

SEQ ID NO: 3995 - DNA, 2136 bp, synthetic construct; identical to SEQ ID NO: 857
  misc_feature 1..2136: note = Synthetic
  source 1..2136: mol_type = other DNA

SEQ ID NO: 3996 - DNA, 2130 bp, synthetic construct; identical to SEQ ID NO: 858
  misc_feature 1..2130: note = Synthetic
  source 1..2130: mol_type = other DNA

SEQ ID NO: 3997 - DNA, 2118 bp, synthetic construct; identical to SEQ ID NO: 859
  misc_feature 1..2118: note = Synthetic
  source 1..2118: mol_type = other DNA

SEQ ID NO: 3998 - DNA, 2118 bp, synthetic construct; identical to SEQ ID NO: 860
  misc_feature 1..2118: note = Synthetic
  source 1..2118: mol_type = other DNA

SEQ ID NO: 3999 - DNA, 2118 bp, synthetic construct; identical to SEQ ID NO: 861
  misc_feature 1..2118: note = Synthetic
  source 1..2118: mol_type = other DNA

SEQ ID NO: 4000 - DNA, 2136 bp, synthetic construct; identical to SEQ ID NO: 862
  misc_feature 1..2136: note = Synthetic
  source 1..2136: mol_type = other DNA

SEQ ID NO: 4001 - DNA, 2118 bp, synthetic construct; identical to SEQ ID NO: 863
  misc_feature 1..2118: note = Synthetic
  source 1..2118: mol_type = other DNA

SEQ ID NO: 4002 - DNA, 2136 bp, synthetic construct; identical to SEQ ID NO: 864
  misc_feature 1..2136: note = Synthetic
  source 1..2136: mol_type = other DNA

SEQ ID NO: 4003 - DNA, 2151 bp, synthetic construct; identical to SEQ ID NO: 865
  misc_feature 1..2151: note = Synthetic
  source 1..2151: mol_type = other DNA

SEQ ID NO: 4004 - DNA, 2112 bp, synthetic construct; identical to SEQ ID NO: 866
  misc_feature 1..2112: note = Synthetic
  source 1..2112: mol_type = other DNA

SEQ ID NO: 4005 - DNA, 2136 bp, synthetic construct; identical to SEQ ID NO: 867
  misc_feature 1..2136: note = Synthetic
  source 1..2136: mol_type = other DNA

SEQ ID NO: 4006 - DNA, 2136 bp, synthetic construct; identical to SEQ ID NO: 868
  misc_feature 1..2136: note = Synthetic
  source 1..2136: mol_type = other DNA

SEQ ID NO: 4007 - DNA, 2124 bp, synthetic construct; identical to SEQ ID NO: 869
  misc_feature 1..2124: note = Synthetic
  source 1..2124: mol_type = other DNA

SEQ ID NO: 4008 - DNA, 2148 bp, synthetic construct; identical to SEQ ID NO: 870
  misc_feature 1..2148: note = Synthetic
  source 1..2148: mol_type = other DNA

SEQ ID NO: 4009 - DNA, 2130 bp, synthetic construct; identical to SEQ ID NO: 871
  misc_feature 1..2130: note = Synthetic
  source 1..2130: mol_type = other DNA

SEQ ID NO: 4010 - DNA, 2127 bp, synthetic construct; identical to SEQ ID NO: 872
  misc_feature 1..2127: note = Synthetic
  source 1..2127: mol_type = other DNA

SEQ ID NO: 4011 - DNA, 2139 bp, synthetic construct; identical to SEQ ID NO: 873
  misc_feature 1..2139: note = Synthetic
  source 1..2139: mol_type = other DNA

SEQ ID NO: 4012 - DNA, 2139 bp, synthetic construct; identical to SEQ ID NO: 874
  misc_feature 1..2139: note = Synthetic
  source 1..2139: mol_type = other DNA

SEQ ID NO: 4013 - DNA, 2130 bp, synthetic construct; identical to SEQ ID NO: 875
  misc_feature 1..2130: note = Synthetic
  source 1..2130: mol_type = other DNA

SEQ ID NO: 4014 - DNA, 2130 bp, synthetic construct; identical to SEQ ID NO: 876
  misc_feature 1..2130: note = Synthetic
  source 1..2130: mol_type = other DNA

SEQ ID NO: 4015 - DNA, 2127 bp, synthetic construct; identical to SEQ ID NO: 877
  misc_feature 1..2127: note = Synthetic
  source 1..2127: mol_type = other DNA

SEQ ID NO: 4016 - DNA, 2130 bp, synthetic construct; identical to SEQ ID NO: 878
  misc_feature 1..2130: note = Synthetic
  source 1..2130: mol_type = other DNA

SEQ ID NO: 4017 - DNA, 2136 bp, synthetic construct; identical to SEQ ID NO: 879
  misc_feature 1..2136: note = Synthetic
  source 1..2136: mol_type = other DNA

SEQ ID NO: 4018 - DNA, 2136 bp, synthetic construct; identical to SEQ ID NO: 880
  misc_feature 1..2136: note = Synthetic
  source 1..2136: mol_type = other DNA

SEQ ID NO: 4019 - DNA, 2136 bp, synthetic construct; identical to SEQ ID NO: 881
  misc_feature 1..2136: note = Synthetic
  source 1..2136: mol_type = other DNA

SEQ ID NO: 4020 - DNA, 2118 bp, synthetic construct; identical to SEQ ID NO: 882
  misc_feature 1..2118: note = Synthetic
  source 1..2118: mol_type = other DNA

SEQ ID NO: 4021 - DNA, 2136 bp, synthetic construct; identical to SEQ ID NO: 883
  misc_feature 1..2136: note = Synthetic
  source 1..2136: mol_type = other DNA

SEQ ID NO: 4022 - DNA, 2130 bp, synthetic construct; identical to SEQ ID NO: 884
  misc_feature 1..2130: note = Synthetic
  source 1..2130: mol_type = other DNA

SEQ ID NO: 4023 - DNA, 2118 bp, synthetic construct; identical to SEQ ID NO: 885
  misc_feature 1..2118: note = Synthetic
  source 1..2118: mol_type = other DNA

SEQ ID NO: 4024 - DNA, 2118 bp, synthetic construct; identical to SEQ ID NO: 886
  misc_feature 1..2118: note = Synthetic
  source 1..2118: mol_type = other DNA

SEQ ID NO: 4025 - DNA, 2118 bp, synthetic construct; identical to SEQ ID NO: 887
  misc_feature 1..2118: note = Synthetic
  source 1..2118: mol_type = other DNA

SEQ ID NO: 4026 - DNA, 2136 bp, synthetic construct; identical to SEQ ID NO: 888
  misc_feature 1..2136: note = Synthetic
  source 1..2136: mol_type = other DNA

SEQ ID NO: 4027 - DNA, 2118 bp, synthetic construct; identical to SEQ ID NO: 889
  misc_feature 1..2118: note = Synthetic
  source 1..2118: mol_type = other DNA

SEQ ID NO: 4028 - DNA, 2136 bp, synthetic construct; identical to SEQ ID NO: 890
  misc_feature 1..2136: note = Synthetic
  source 1..2136: mol_type = other DNA

SEQ ID NO: 4029 - DNA, 2151 bp, synthetic construct; identical to SEQ ID NO: 891
  misc_feature 1..2151: note = Synthetic
  source 1..2151: mol_type = other DNA

SEQ ID NO: 4030 - DNA, 2112 bp, synthetic construct; identical to SEQ ID NO: 892
  misc_feature 1..2112: note = Synthetic
  source 1..2112: mol_type = other DNA

SEQ ID NO: 4031 - DNA, 2136 bp, synthetic construct; identical to SEQ ID NO: 893
  misc_feature 1..2136: note = Synthetic
  source 1..2136: mol_type = other DNA

SEQ ID NO: 4032 - DNA, 2136 bp, synthetic construct; identical to SEQ ID NO: 894
  misc_feature 1..2136: note = Synthetic
  source 1..2136: mol_type = other DNA

SEQ ID NO: 4033 - DNA, 2124 bp, synthetic construct; identical to SEQ ID NO: 895
  misc_feature 1..2124: note = Synthetic
  source 1..2124: mol_type = other DNA

SEQ ID NO: 4034 - DNA, 2148 bp, synthetic construct; identical to SEQ ID NO: 896
  misc_feature 1..2148: note = Synthetic
  source 1..2148: mol_type = other DNA

SEQ ID NO: 4035 - DNA, 2130 bp, synthetic construct; identical to SEQ ID NO: 897
  misc_feature 1..2130: note = Synthetic
  source 1..2130: mol_type = other DNA

SEQ ID NO: 4036 - DNA, 2127 bp, synthetic construct; identical to SEQ ID NO: 898
  misc_feature 1..2127: note = Synthetic
  source 1..2127: mol_type = other DNA

SEQ ID NO: 4037 - DNA, 2139 bp, synthetic construct; identical to SEQ ID NO: 899
  misc_feature 1..2139: note = Synthetic
  source 1..2139: mol_type = other DNA

SEQ ID NO: 4038 - DNA, 2139 bp, synthetic construct; identical to SEQ ID NO: 900
  misc_feature 1..2139: note = Synthetic
  source 1..2139: mol_type = other DNA

SEQ ID NO: 4039 - DNA, 2130 bp, synthetic construct; identical to SEQ ID NO: 901
  misc_feature 1..2130: note = Synthetic
  source 1..2130: mol_type = other DNA

SEQ ID NO: 4040 - DNA, 2130 bp, synthetic construct; identical to SEQ ID NO: 902
  misc_feature 1..2130: note = Synthetic
  source 1..2130: mol_type = other DNA

SEQ ID NO: 4041 - DNA, 2127 bp, synthetic construct; identical to SEQ ID NO: 903
  misc_feature 1..2127: note = Synthetic
  source 1..2127: mol_type = other DNA

SEQ ID NO: 4042 - DNA, 2130 bp, synthetic construct; identical to SEQ ID NO: 904
  misc_feature 1..2130: note = Synthetic
  source 1..2130: mol_type = other DNA

SEQ ID NO: 4043 - protein, 486 aa, synthetic construct; identical to SEQ ID NO: 905
  REGION 1..486: note = Synthetic

SEQ ID NO: 4044 - protein, 486 aa, synthetic construct; identical to SEQ ID NO: 906
  REGION 1..486: note = Synthetic

SEQ ID NO: 4045 - protein, 486 aa, synthetic construct; identical to SEQ ID NO: 907
  REGION 1..486: note = Synthetic

SEQ ID NO: 4046 - protein, 480 aa, synthetic construct; identical to SEQ ID NO: 908
  REGION 1..480: note = Synthetic

SEQ ID NO: 4047 - protein, 486 aa, synthetic construct; identical to SEQ ID NO: 909
  REGION 1..486: note = Synthetic

SEQ ID NO: 4048 - protein, 484 aa, synthetic construct; identical to SEQ ID NO: 910
  REGION 1..484: note = Synthetic

SEQ ID NO: 4049 - protein, 480 aa, synthetic construct; identical to SEQ ID NO: 911
  REGION 1..480: note = Synthetic

SEQ ID NO: 4050 - protein, 480 aa, synthetic construct; identical to SEQ ID NO: 912
  REGION 1..480: note = Synthetic

SEQ ID NO: 4051 - protein, 480 aa, synthetic construct; identical to SEQ ID NO: 913
  REGION 1..480: note = Synthetic

SEQ ID NO: 4052 - protein, 486 aa, synthetic construct; identical to SEQ ID NO: 914
  REGION 1..486: note = Synthetic

SEQ ID NO: 4053 - protein, 480 aa, synthetic construct; identical to SEQ ID NO: 915
  REGION 1..480: note = Synthetic

SEQ ID NO: 4054 - protein, 486 aa, synthetic construct; identical to SEQ ID NO: 916
  REGION 1..486: note = Synthetic

SEQ ID NO: 4055 - protein, 491 aa, synthetic construct; identical to SEQ ID NO: 917
  REGION 1..491: note = Synthetic

SEQ ID NO: 4056 - protein, 478 aa, synthetic construct; identical to SEQ ID NO: 918
  REGION 1..478: note = Synthetic

SEQ ID NO: 4057 - protein, 486 aa, synthetic construct; identical to SEQ ID NO: 919
  REGION 1..486: note = Synthetic

SEQ ID NO: 4058 - protein, 486 aa, synthetic construct; identical to SEQ ID NO: 920
  REGION 1..486: note = Synthetic

SEQ ID NO: 4059 - protein, 482 aa, synthetic construct; identical to SEQ ID NO: 921
  REGION 1..482: note = Synthetic

SEQ ID NO: 4060 - protein, 490 aa, synthetic construct; identical to SEQ ID NO: 922
  REGION 1..490: note = Synthetic

SEQ ID NO: 4061 - protein, 484 aa, synthetic construct; identical to SEQ ID NO: 923
  REGION 1..484: note = Synthetic

SEQ ID NO: 4062 - protein, 483 aa, synthetic construct; identical to SEQ ID NO: 924
  REGION 1..483: note = Synthetic

SEQ ID NO: 4063 - protein, 487 aa, synthetic construct; identical to SEQ ID NO: 925
  REGION 1..487: note = Synthetic

SEQ ID NO: 4064 - protein, 487 aa, synthetic construct; identical to SEQ ID NO: 926
  REGION 1..487: note = Synthetic

SEQ ID NO: 4065 - protein, 484 aa, synthetic construct; identical to SEQ ID NO: 927
  REGION 1..484: note = Synthetic

SEQ ID NO: 4066 - protein, 484 aa, synthetic construct; identical to SEQ ID NO: 928
  REGION 1..484: note = Synthetic

SEQ ID NO: 4067 - protein, 483 aa, synthetic construct; identical to SEQ ID NO: 929
  REGION 1..483: note = Synthetic

SEQ ID NO: 4068 - protein, 484 aa, synthetic construct; identical to SEQ ID NO: 930
  REGION 1..484: note = Synthetic

SEQ ID NO: 4069 - DNA, 1460 bp, synthetic construct; identical to SEQ ID NO: 931
  misc_feature 1..1460: note = Synthetic
  source 1..1460: mol_type = other DNA

SEQ ID NO: 4070 - DNA, 1460 bp, synthetic construct; identical to SEQ ID NO: 932
  misc_feature 1..1460: note = Synthetic
  source 1..1460: mol_type = other DNA

SEQ ID NO: 4071 - DNA, 1460 bp, synthetic construct; identical to SEQ ID NO: 933
  misc_feature 1..1460: note = Synthetic
  source 1..1460: mol_type = other DNA

SEQ ID NO: 4072 - DNA, 1442 bp, synthetic construct; identical to SEQ ID NO: 934
  misc_feature 1..1442: note = Synthetic
  source 1..1442: mol_type = other DNA

SEQ ID NO: 4073 - DNA, 1460 bp, synthetic construct; identical to SEQ ID NO: 935
  misc_feature 1..1460: note = Synthetic
  source 1..1460: mol_type = other DNA

SEQ ID NO: 4074 - DNA, 1454 bp, synthetic construct; identical to SEQ ID NO: 936
  misc_feature 1..1454: note = Synthetic
  source 1..1454: mol_type = other DNA

SEQ ID NO: 4075 - DNA, 1442 bp, synthetic construct; identical to SEQ ID NO: 937
  misc_feature 1..1442: note = Synthetic
  source 1..1442: mol_type = other DNA

SEQ ID NO: 4076 - DNA, 1442 bp, synthetic construct; identical to SEQ ID NO: 938
  misc_feature 1..1442: note = Synthetic
  source 1..1442: mol_type = other DNA

SEQ ID NO: 4077 - DNA, 1442 bp, synthetic construct; identical to SEQ ID NO: 939
  misc_feature 1..1442: note = Synthetic
  source 1..1442: mol_type = other DNA

SEQ ID NO: 4078 - DNA, 1460 bp, synthetic construct; identical to SEQ ID NO: 940
  misc_feature 1..1460: note = Synthetic
  source 1..1460: mol_type = other DNA

SEQ ID NO: 4079 - DNA, 1442 bp, synthetic construct; identical to SEQ ID NO: 941
  misc_feature 1..1442: note = Synthetic
  source 1..1442: mol_type = other DNA

SEQ ID NO: 4080 - DNA, 1460 bp, synthetic construct; identical to SEQ ID NO: 942
  misc_feature 1..1460: note = Synthetic
  source 1..1460: mol_type = other DNA

SEQ ID NO: 4081 - DNA, 1475 bp, synthetic construct; identical to SEQ ID NO: 943
  misc_feature 1..1475: note = Synthetic
  source 1..1475: mol_type = other DNA

SEQ ID NO: 4082 - DNA, 1436 bp, synthetic construct; identical to SEQ ID NO: 944
  misc_feature 1..1436: note = Synthetic
  source 1..1436: mol_type = other DNA

SEQ ID NO: 4083 - DNA, 1460 bp, synthetic construct; identical to SEQ ID NO: 945
  misc_feature 1..1460: note = Synthetic
  source 1..1460: mol_type = other DNA

SEQ ID NO: 4084 - DNA, 1460 bp, synthetic construct; identical to SEQ ID NO: 946
  misc_feature 1..1460: note = Synthetic
  source 1..1460: mol_type = other DNA

SEQ ID NO: 4085 - DNA, 1448 bp, synthetic construct; identical to SEQ ID NO: 947
  misc_feature 1..1448: note = Synthetic
  source 1..1448: mol_type = other DNA

SEQ ID NO: 4086 - DNA, 1472 bp, synthetic construct; identical to SEQ ID NO: 948
  misc_feature 1..1472: note = Synthetic
  source 1..1472: mol_type = other DNA

SEQ ID NO: 4087 - DNA, 1454 bp, synthetic construct; identical to SEQ ID NO: 949
  misc_feature 1..1454: note = Synthetic
  source 1..1454: mol_type = other DNA

SEQ ID NO: 4088 - DNA, 1451 bp, synthetic construct; identical to SEQ ID NO: 950
  misc_feature 1..1451: note = Synthetic
  source 1..1451: mol_type = other DNA

SEQ ID NO: 4089 - DNA, 1463 bp, synthetic construct; identical to SEQ ID NO: 951
  misc_feature 1..1463: note = Synthetic
  source 1..1463: mol_type = other DNA

SEQ ID NO: 4090 - DNA, 1463 bp, synthetic construct; identical to SEQ ID NO: 952
  misc_feature 1..1463: note = Synthetic
  source 1..1463: mol_type = other DNA

SEQ ID NO: 4091 - DNA, 1454 bp, synthetic construct; identical to SEQ ID NO: 953
  misc_feature 1..1454: note = Synthetic
  source 1..1454: mol_type = other DNA

SEQ ID NO: 4092 - DNA, 1454 bp, synthetic construct; identical to SEQ ID NO: 954
  misc_feature 1..1454: note = Synthetic
  source 1..1454: mol_type = other DNA

SEQ ID NO: 4093 - DNA, 1451 bp, synthetic construct; identical to SEQ ID NO: 955
  misc_feature 1..1451: note = Synthetic
  source 1..1451: mol_type = other DNA

SEQ ID NO: 4094 - DNA, 1454 bp, synthetic construct; identical to SEQ ID NO: 956
  misc_feature 1..1454: note = Synthetic
  source 1..1454: mol_type = other DNA

SEQ ID NO: 4095 - DNA, 1460 bp, synthetic construct; identical to SEQ ID NO: 957
  misc_feature 1..1460: note = Synthetic
  source 1..1460: mol_type = other DNA

SEQ ID NO: 4096 - DNA, 1460 bp, synthetic construct; identical to SEQ ID NO: 958
  misc_feature 1..1460: note = Synthetic
  source 1..1460: mol_type = other DNA

SEQ ID NO: 4097 - DNA, 1460 bp, synthetic construct; identical to SEQ ID NO: 959
  misc_feature 1..1460: note = Synthetic
  source 1..1460: mol_type = other DNA

SEQ ID NO: 4098 - DNA, 1442 bp, synthetic construct; identical to SEQ ID NO: 960
  misc_feature 1..1442: note = Synthetic
  source 1..1442: mol_type = other DNA

SEQ ID NO: 4099 - DNA, 1460 bp, synthetic construct; identical to SEQ ID NO: 961
  misc_feature 1..1460: note = Synthetic
  source 1..1460: mol_type = other DNA

SEQ ID NO: 4100 - DNA, 1454 bp, synthetic construct; identical to SEQ ID NO: 962
  misc_feature 1..1454: note = Synthetic
  source 1..1454: mol_type = other DNA

SEQ ID NO: 4101 - DNA, 1442 bp, synthetic construct; identical to SEQ ID NO: 963
  misc_feature 1..1442: note = Synthetic
  source 1..1442: mol_type = other DNA

SEQ ID NO: 4102 - DNA, 1442 bp, synthetic construct; identical to SEQ ID NO: 964
  misc_feature 1..1442: note = Synthetic
  source 1..1442: mol_type = other DNA

SEQ ID NO: 4103 - DNA, 1442 bp, synthetic construct; identical to SEQ ID NO: 965
  misc_feature 1..1442: note = Synthetic
  source 1..1442: mol_type = other DNA

SEQ ID NO: 4104 - DNA, 1460 bp, synthetic construct; identical to SEQ ID NO: 966
  misc_feature 1..1460: note = Synthetic
  source 1..1460: mol_type = other DNA

SEQ ID NO: 4105 - DNA, 1442 bp, synthetic construct; identical to SEQ ID NO: 967
  misc_feature 1..1442: note = Synthetic
  source 1..1442: mol_type = other DNA

SEQ ID NO: 4106 - DNA, 1460 bp, synthetic construct; identical to SEQ ID NO: 968
  misc_feature 1..1460: note = Synthetic
  source 1..1460: mol_type = other DNA

SEQ ID NO: 4107 - DNA, 1475 bp, synthetic construct; identical to SEQ ID NO: 969
  misc_feature 1..1475: note = Synthetic
  source 1..1475: mol_type = other DNA

SEQ ID NO: 4108 - DNA, 1436 bp, synthetic construct; identical to SEQ ID NO: 970
  misc_feature 1..1436: note = Synthetic
  source 1..1436: mol_type = other DNA

SEQ ID NO: 4109 - DNA, 1460 bp, synthetic construct; identical to SEQ ID NO: 971
  misc_feature 1..1460: note = Synthetic
  source 1..1460: mol_type = other DNA

SEQ ID NO: 4110 - DNA, 1460 bp, synthetic construct; identical to SEQ ID NO: 972
  misc_feature 1..1460: note = Synthetic
  source 1..1460: mol_type = other DNA

SEQ ID NO: 4111 - DNA, 1448 bp, synthetic construct; identical to SEQ ID NO: 973
  misc_feature 1..1448: note = Synthetic
  source 1..1448: mol_type = other DNA

SEQ ID NO: 4112 - DNA, 1472 bp, synthetic construct; identical to SEQ ID NO: 974
  misc_feature 1..1472: note = Synthetic
  source 1..1472: mol_type = other DNA

SEQ ID NO: 4113 - DNA, 1454 bp, synthetic construct; identical to SEQ ID NO: 975
  misc_feature 1..1454: note = Synthetic
  source 1..1454: mol_type = other DNA

SEQ ID NO: 4114 - DNA, 1451 bp, synthetic construct; identical to SEQ ID NO: 976
  misc_feature 1..1451: note = Synthetic
  source 1..1451: mol_type = other DNA

SEQ ID NO: 4115 - DNA, 1463 bp, synthetic construct; identical to SEQ ID NO: 977
  misc_feature 1..1463: note = Synthetic
  source 1..1463: mol_type = other DNA

SEQ ID NO: 4116 - DNA, 1463 bp, synthetic construct; identical to SEQ ID NO: 978
  misc_feature 1..1463: note = Synthetic
  source 1..1463: mol_type = other DNA

SEQ ID NO: 4117 - DNA, 1454 bp, synthetic construct; identical to SEQ ID NO: 979
  misc_feature 1..1454: note = Synthetic
  source 1..1454: mol_type = other DNA

SEQ ID NO: 4118 - DNA, 1454 bp, synthetic construct; identical to SEQ ID NO: 980
  misc_feature 1..1454: note = Synthetic
  source 1..1454: mol_type = other DNA

SEQ ID NO: 4119 - DNA, 1451 bp, synthetic construct; identical to SEQ ID NO: 981
  misc_feature 1..1451: note = Synthetic
  source 1..1451: mol_type = other DNA

SEQ ID NO: 4120 - DNA, 1454 bp, synthetic construct; identical to SEQ ID NO: 982
  misc_feature 1..1454: note = Synthetic
  source 1..1454: mol_type = other DNA

SEQ ID NO: 4121 - protein, 711 aa, synthetic construct; identical to SEQ ID NO: 983
  REGION 1..711: note = Synthetic

SEQ ID NO: 4122 - protein, 711 aa, synthetic construct; identical to SEQ ID NO: 984
  REGION 1..711: note = Synthetic

SEQ ID NO: 4123 - protein, 711 aa, synthetic construct; identical to SEQ ID NO: 985
  REGION 1..711: note = Synthetic

SEQ ID NO: 4124 - protein, 705 aa, synthetic construct; identical to SEQ ID NO: 986
  REGION 1..705: note = Synthetic

SEQ ID NO: 4125 - protein, 711 aa, synthetic construct; identical to SEQ ID NO: 987
  REGION 1..711: note = Synthetic

SEQ ID NO: 4126 - protein, 709 aa, synthetic construct; identical to SEQ ID NO: 988
  REGION 1..709: note = Synthetic

SEQ ID NO: 4127 - protein, 705 aa, synthetic construct; identical to SEQ ID NO: 989
  REGION 1..705: note = Synthetic

SEQ ID NO: 4128 - protein, 705 aa, synthetic construct; identical to SEQ ID NO: 990
  REGION 1..705: note = Synthetic

SEQ ID NO: 4129 - protein, 705 aa, synthetic construct; identical to SEQ ID NO: 991
  REGION 1..705: note = Synthetic

SEQ ID NO: 4130 - protein, 711 aa, synthetic construct; identical to SEQ ID NO: 992
  REGION 1..711: note = Synthetic

SEQ ID NO: 4131 - protein, 705 aa, synthetic construct; identical to SEQ ID NO: 993
  REGION 1..705: note = Synthetic

SEQ ID NO: 4132 - protein, 711 aa, synthetic construct; identical to SEQ ID NO: 994
  REGION 1..711: note = Synthetic

SEQ ID NO: 4133 - protein, 716 aa, synthetic construct; identical to SEQ ID NO: 995
  REGION 1..716: note = Synthetic

SEQ ID NO: 4134 - protein, 703 aa, synthetic construct; identical to SEQ ID NO: 996
  REGION 1..703: note = Synthetic

SEQ ID NO: 4135 - protein, 711 aa, synthetic construct; identical to SEQ ID NO: 997
  REGION 1..711: note = Synthetic

SEQ ID NO: 4136 - protein, 711 aa, synthetic construct; identical to SEQ ID NO: 998
  REGION 1..711: note = Synthetic

SEQ ID NO: 4137 - protein, 707 aa, synthetic construct; identical to SEQ ID NO: 999
  REGION 1..707: note = Synthetic

SEQ ID NO: 4138 - protein, 715 aa, synthetic construct; identical to SEQ ID NO: 1000
  REGION 1..715: note = Synthetic

SEQ ID NO: 4139 - protein, 709 aa, synthetic construct; identical to SEQ ID NO: 1001
  REGION 1..709: note = Synthetic

SEQ ID NO: 4140 - protein, 708 aa, synthetic construct; identical to SEQ ID NO: 1002
  REGION 1..708: note = Synthetic

SEQ ID NO: 4141 - protein, 712 aa, synthetic construct; identical to SEQ ID NO: 1003
  REGION 1..712: note = Synthetic

SEQ ID NO: 4142 - protein, 712 aa, synthetic construct; identical to SEQ ID NO: 1004
  REGION 1..712: note = Synthetic

SEQ ID NO: 4143 - protein, 709 aa, synthetic construct; identical to SEQ ID NO: 1005
  REGION 1..709: note = Synthetic

SEQ ID NO: 4144 - protein, 709 aa, synthetic construct; identical to SEQ ID NO: 1006
  REGION 1..709: note = Synthetic

SEQ ID NO: 4145 - protein, 708 aa, synthetic construct; identical to SEQ ID NO: 1007
  REGION 1..708: note = Synthetic

SEQ ID NO: 4146 - protein, 709 aa, synthetic construct; identical to SEQ ID NO: 1008
  REGION 1..709: note = Synthetic

SEQ ID NO: 4147 - DNA, 2136 bp, synthetic construct; identical to SEQ ID NO: 1009
  misc_feature 1..2136: note = Synthetic
  source 1..2136: mol_type = other DNA

SEQ ID NO: 4148 - DNA, 2136 bp, synthetic construct; identical to SEQ ID NO: 1010
  misc_feature 1..2136: note = Synthetic
  source 1..2136: mol_type = other DNA

SEQ ID NO: 4149 - DNA, 2136 bp, synthetic construct; identical to SEQ ID NO: 1011
  misc_feature 1..2136: note = Synthetic
  source 1..2136: mol_type = other DNA

SEQ ID NO: 4150 - DNA, 2118 bp, synthetic construct; identical to SEQ ID NO: 1012
  misc_feature 1..2118: note = Synthetic
  source 1..2118: mol_type = other DNA

SEQ ID NO: 4151 - DNA, 2136 bp, synthetic construct; identical to SEQ ID NO: 1013
  misc_feature 1..2136: note = Synthetic
  source 1..2136: mol_type = other DNA

SEQ ID NO: 4152 - DNA, 2130 bp, synthetic construct; identical to SEQ ID NO: 1014
  misc_feature 1..2130: note = Synthetic
  source 1..2130: mol_type = other DNA

SEQ ID NO: 4153 - DNA, 2118 bp, synthetic construct; identical to SEQ ID NO: 1015
  misc_feature 1..2118: note = Synthetic
  source 1..2118: mol_type = other DNA

SEQ ID NO: 4154 - DNA, 2118 bp, synthetic construct; identical to SEQ ID NO: 1016
  misc_feature 1..2118: note = Synthetic
  source 1..2118: mol_type = other DNA

SEQ ID NO: 4155 - DNA, 2118 bp, synthetic construct; identical to SEQ ID NO: 1017
  misc_feature 1..2118: note = Synthetic
  source 1..2118: mol_type = other DNA

SEQ ID NO: 4156 - DNA, 2136 bp, synthetic construct; identical to SEQ ID NO: 1018
  misc_feature 1..2136: note = Synthetic
  source 1..2136: mol_type = other DNA

SEQ ID NO: 4157 - DNA, 2118 bp, synthetic construct; identical to SEQ ID NO: 1019
  misc_feature 1..2118: note = Synthetic
  source 1..2118: mol_type = other DNA

SEQ ID NO: 4158 - DNA, 2136 bp, synthetic construct; identical to SEQ ID NO: 1020
  misc_feature 1..2136: note = Synthetic
  source 1..2136: mol_type = other DNA

SEQ ID NO: 4159 - DNA, 2151 bp, synthetic construct; identical to SEQ ID NO: 1021
  misc_feature 1..2151: note = Synthetic
  source 1..2151: mol_type = other DNA

SEQ ID NO: 4160 - DNA, 2112 bp, synthetic construct; identical to SEQ ID NO: 1022
  misc_feature 1..2112: note = Synthetic
  source 1..2112: mol_type = other DNA

SEQ ID NO: 4161 - DNA, 2136 bp, synthetic construct; identical to SEQ ID NO: 1023
  misc_feature 1..2136: note = Synthetic
  source 1..2136: mol_type = other DNA

SEQ ID NO: 4162 - DNA, 2136 bp, synthetic construct; identical to SEQ ID NO: 1024
  misc_feature 1..2136: note = Synthetic
  source 1..2136: mol_type = other DNA

SEQ ID NO: 4163 - DNA, 2124 bp, synthetic construct; identical to SEQ ID NO: 1025
  misc_feature 1..2124: note = Synthetic
  source 1..2124: mol_type = other DNA

SEQ ID NO: 4164 - DNA, 2148 bp, synthetic construct; identical to SEQ ID NO: 1026
  misc_feature 1..2148: note = Synthetic
  source 1..2148: mol_type = other DNA

SEQ ID NO: 4165 - DNA, 2130 bp, synthetic construct; identical to SEQ ID NO: 1027
  misc_feature 1..2130: note = Synthetic
  source 1..2130: mol_type = other DNA

SEQ ID NO: 4166 - DNA, 2127 bp, synthetic construct; identical to SEQ ID NO: 1028
  misc_feature 1..2127: note = Synthetic
  source 1..2127: mol_type = other DNA

SEQ ID NO: 4167 - DNA, 2139 bp, synthetic construct; identical to SEQ ID NO: 1029
  misc_feature 1..2139: note = Synthetic
  source 1..2139: mol_type = other DNA

SEQ ID NO: 4168 - DNA, 2139 bp, synthetic construct; identical to SEQ ID NO: 1030
  misc_feature 1..2139: note = Synthetic
  source 1..2139: mol_type = other DNA

SEQ ID NO: 4169 - DNA, 2130 bp, synthetic construct; identical to SEQ ID NO: 1031
  misc_feature 1..2130: note = Synthetic
  source 1..2130: mol_type = other DNA

SEQ ID NO: 4170 - DNA, 2130 bp, synthetic construct; identical to SEQ ID NO: 1032
  misc_feature 1..2130: note = Synthetic
  source 1..2130: mol_type = other DNA

SEQ ID NO: 4171 - DNA, 2127 bp, synthetic construct; identical to SEQ ID NO: 1033
  misc_feature 1..2127: note = Synthetic
  source 1..2127: mol_type = other DNA

SEQ ID NO: 4172 - DNA, 2130 bp, synthetic construct; identical to SEQ ID NO: 1034
  misc_feature 1..2130: note = Synthetic
  source 1..2130: mol_type = other DNA

SEQ ID NO: 4173 - DNA, 2136 bp, synthetic construct; identical to SEQ ID NO: 1035
  misc_feature 1..2136: note = Synthetic
  source 1..2136: mol_type = other DNA

SEQ ID NO: 4174 - DNA, 2136 bp, synthetic construct; identical to SEQ ID NO: 1036
  misc_feature 1..2136: note = Synthetic
  source 1..2136: mol_type = other DNA

SEQ ID NO: 4175 - DNA, 2136 bp, synthetic construct; identical to SEQ ID NO: 1037
  misc_feature 1..2136: note = Synthetic
  source 1..2136: mol_type = other DNA

SEQ ID NO: 4176 - DNA, 2118 bp, synthetic construct; identical to SEQ ID NO: 1038
  misc_feature 1..2118: note = Synthetic
  source 1..2118: mol_type = other DNA

SEQ ID NO: 4177 - DNA, 2136 bp, synthetic construct; identical to SEQ ID NO: 1039
  misc_feature 1..2136: note = Synthetic
  source 1..2136: mol_type = other DNA

SEQ ID NO: 4178 - DNA, 2130 bp, synthetic construct; identical to SEQ ID NO: 1040
  misc_feature 1..2130: note = Synthetic
  source 1..2130: mol_type = other DNA

SEQ ID NO: 4179 - DNA, 2118 bp, synthetic construct; identical to SEQ ID NO: 1041
  misc_feature 1..2118: note = Synthetic
  source 1..2118: mol_type = other DNA

SEQ ID NO: 4180 - DNA, 2118 bp, synthetic construct; identical to SEQ ID NO: 1042
  misc_feature 1..2118: note = Synthetic
  source 1..2118: mol_type = other DNA

SEQ ID NO: 4181 - DNA, 2118 bp, synthetic construct; identical to SEQ ID NO: 1043
  misc_feature 1..2118: note = Synthetic
  source 1..2118: mol_type = other DNA

SEQ ID NO: 4182 - DNA, 2136 bp, synthetic construct; identical to SEQ ID NO: 1044
  misc_feature 1..2136: note = Synthetic
  source 1..2136: mol_type = other DNA

SEQ ID NO: 4183 - DNA, 2118 bp, synthetic construct; identical to SEQ ID NO: 1045
  misc_feature 1..2118: note = Synthetic
  source 1..2118: mol_type = other DNA

SEQ ID NO: 4184 - DNA, 2136 bp, synthetic construct; identical to SEQ ID NO: 1046
  misc_feature 1..2136: note = Synthetic
  source 1..2136: mol_type = other DNA

SEQ ID NO: 4185 - DNA, 2151 bp, synthetic construct; identical to SEQ ID NO: 1047
  misc_feature 1..2151: note = Synthetic
  source 1..2151: mol_type = other DNA

SEQ ID NO: 4186 - DNA, 2112 bp, synthetic construct; identical to SEQ ID NO: 1048
  misc_feature 1..2112: note = Synthetic
  source 1..2112: mol_type = other DNA

SEQ ID NO: 4187 - DNA, 2136 bp, synthetic construct; identical to SEQ ID NO: 1049
  misc_feature 1..2136: note = Synthetic
  source 1..2136: mol_type = other DNA

SEQ ID NO: 4188 - DNA, 2136 bp, synthetic construct; identical to SEQ ID NO: 1050
  misc_feature 1..2136: note = Synthetic
  source 1..2136: mol_type = other DNA

SEQ ID NO: 4189 - DNA, 2124 bp, synthetic construct; identical to SEQ ID NO: 1051
  misc_feature 1..2124: note = Synthetic
  source 1..2124: mol_type = other DNA

SEQ ID NO: 4190 - DNA, 2148 bp, synthetic construct; identical to SEQ ID NO: 1052
  misc_feature 1..2148: note = Synthetic
  source 1..2148: mol_type = other DNA

SEQ ID NO: 4191 - DNA, 2130 bp, synthetic construct; identical to SEQ ID NO: 1053
  misc_feature 1..2130: note = Synthetic
  source 1..2130: mol_type = other DNA

SEQ ID NO: 4192 - DNA, 2127 bp, synthetic construct; identical to SEQ ID NO: 1054
  misc_feature 1..2127: note = Synthetic
  source 1..2127: mol_type = other DNA

SEQ ID NO: 4193 - DNA, 2139 bp, synthetic construct; identical to SEQ ID NO: 1055
  misc_feature 1..2139: note = Synthetic
  source 1..2139: mol_type = other DNA

SEQ ID NO: 4194 - DNA, 2139 bp, synthetic construct; identical to SEQ ID NO: 1056
  misc_feature 1..2139: note = Synthetic
  source 1..2139: mol_type = other DNA

SEQ ID NO: 4195 - DNA, 2130 bp, synthetic construct; identical to SEQ ID NO: 1057
  misc_feature 1..2130: note = Synthetic
  source 1..2130: mol_type = other DNA

SEQ ID NO: 4196 - DNA, 2130 bp, synthetic construct; identical to SEQ ID NO: 1058
  misc_feature 1..2130: note = Synthetic
  source 1..2130: mol_type = other DNA

SEQ ID NO: 4197 - DNA, 2127 bp, synthetic construct; identical to SEQ ID NO: 1059
  misc_feature 1..2127: note = Synthetic
  source 1..2127: mol_type = other DNA

SEQ ID NO: 4198 - DNA, 2130 bp, synthetic construct; identical to SEQ ID NO: 1060
  misc_feature 1..2130: note = Synthetic
  source 1..2130: mol_type = other DNA

SEQ ID NO: 4199 - protein, 453 aa, synthetic construct; identical to SEQ ID NO: 1061
  REGION 1..453: note = Synthetic

SEQ ID NO: 4200 - protein, 453 aa, synthetic construct; identical to SEQ ID NO: 1062
  REGION 1..453: note = Synthetic

SEQ ID NO: 4201 - protein, 453 aa, synthetic construct; identical to SEQ ID NO: 1063
  REGION 1..453: note = Synthetic

SEQ ID NO: 4202 - protein, 447 aa, synthetic construct; identical to SEQ ID NO: 1064
  REGION 1..447: note = Synthetic

SEQ ID NO: 4203 - protein, 453 aa, synthetic construct; identical to SEQ ID NO: 1065
  REGION 1..453: note = Synthetic

SEQ ID NO: 4204 - protein, 451 aa, synthetic construct; identical to SEQ ID NO: 1066
  REGION 1..451: note = Synthetic

SEQ ID NO: 4205 - protein, 447 aa, synthetic construct; identical to SEQ ID NO: 1067
  REGION 1..447: note = Synthetic

SEQ ID NO: 4206 - protein, 447 aa, synthetic construct; identical to SEQ ID NO: 1068
  REGION 1..447: note = Synthetic

SEQ ID NO: 4207 - protein, 447 aa, synthetic construct; identical to SEQ ID NO: 1069
  REGION 1..447: note = Synthetic

SEQ ID NO: 4208 - protein, 453 aa, synthetic construct; identical to SEQ ID NO: 1070
  REGION 1..453: note = Synthetic

SEQ ID NO: 4209 - protein, 447 aa, synthetic construct; identical to SEQ ID NO: 1071
  REGION 1..447: note = Synthetic

SEQ ID NO: 4210 - protein, 453 aa, synthetic construct; identical to SEQ ID NO: 1072
  REGION 1..453: note = Synthetic

SEQ ID NO: 4211 - protein, 458 aa, synthetic construct; identical to SEQ ID NO: 1073
  REGION 1..458: note = Synthetic

SEQ ID NO: 4212 - protein, 445 aa, synthetic construct; identical to SEQ ID NO: 1074
  REGION 1..445: note = Synthetic

SEQ ID NO: 4213 - protein, 453 aa, synthetic construct; identical to SEQ ID NO: 1075
  REGION 1..453: note = Synthetic

SEQ ID NO: 4214 - protein, 453 aa, synthetic construct; identical to SEQ ID NO: 1076
  REGION 1..453: note = Synthetic

SEQ ID NO: 4215 - protein, 449 aa, synthetic construct; identical to SEQ ID NO: 1077
  REGION 1..449: note = Synthetic

SEQ ID NO: 4216 - protein, 457 aa, synthetic construct; identical to SEQ ID NO: 1078
  REGION 1..457: note = Synthetic

SEQ ID NO: 4217 - protein, 451 aa, synthetic construct; identical to SEQ ID NO: 1079
  REGION 1..451: note = Synthetic

SEQ ID NO: 4218 - protein, 450 aa, synthetic construct; identical to SEQ ID NO: 1080
  REGION 1..450: note = Synthetic

SEQ ID NO: 4219 - protein, 454 aa, synthetic construct; identical to SEQ ID NO: 1081
  REGION 1..454: note = Synthetic

SEQ ID NO: 4220 - protein, 454 aa, synthetic construct; identical to SEQ ID NO: 1082
  REGION 1..454: note = Synthetic

SEQ ID NO: 4221 - protein, 451 aa, synthetic construct; identical to SEQ ID NO: 1083
  REGION 1..451: note = Synthetic

SEQ ID NO: 4222 - protein, 451 aa, synthetic construct; identical to SEQ ID NO: 1084
  REGION 1..451: note = Synthetic

SEQ ID NO: 4223 - protein, 450 aa, synthetic construct; identical to SEQ ID NO: 1085
  REGION 1..450: note = Synthetic

SEQ ID NO: 4224 - protein, 451 aa, synthetic construct; identical to SEQ ID NO: 1086
  REGION 1..451: note = Synthetic

SEQ ID NO: 4225 - DNA, 1361 bp, synthetic construct; identical to SEQ ID NO: 1087
  misc_feature 1..1361: note = Synthetic
  source 1..1361: mol_type = other DNA

SEQ ID NO: 4226 - DNA, 1361 bp, synthetic construct; identical to SEQ ID NO: 1088
  misc_feature 1..1361: note = Synthetic
  source 1..1361: mol_type = other DNA

SEQ ID NO: 4227 - DNA, 1361 bp, synthetic construct; identical to SEQ ID NO: 1089
  misc_feature 1..1361: note = Synthetic
  source 1..1361: mol_type = other DNA

SEQ ID NO: 4228 - DNA, 1343 bp, synthetic construct; identical to SEQ ID NO: 1090
  misc_feature 1..1343: note = Synthetic
  source 1..1343: mol_type = other DNA

SEQ ID NO: 4229 - DNA, 1361 bp, synthetic construct; identical to SEQ ID NO: 1091
  misc_feature 1..1361: note = Synthetic
  source 1..1361: mol_type = other DNA

SEQ ID NO: 4230 - DNA, 1355 bp, synthetic construct; identical to SEQ ID NO: 1092
  misc_feature 1..1355: note = Synthetic
  source 1..1355: mol_type = other DNA

SEQ ID NO: 4231 - DNA, 1343 bp, synthetic construct; identical to SEQ ID NO: 1093
  misc_feature 1..1343: note = Synthetic
  source 1..1343: mol_type = other DNA

SEQ ID NO: 4232 - DNA, 1343 bp, synthetic construct; identical to SEQ ID NO: 1094
  misc_feature 1..1343: note = Synthetic
  source 1..1343: mol_type = other DNA

SEQ ID NO: 4233 - DNA, 1343 bp, synthetic construct; identical to SEQ ID NO: 1095
  misc_feature 1..1343: note = Synthetic
  source 1..1343: mol_type = other DNA

SEQ ID NO: 4234 - DNA, 1361 bp, synthetic construct; identical to SEQ ID NO: 1096
  misc_feature 1..1361: note = Synthetic
  source 1..1361: mol_type = other DNA

SEQ ID NO: 4235 - DNA, 1343 bp, synthetic construct; identical to SEQ ID NO: 1097
  misc_feature 1..1343: note = Synthetic
  source 1..1343: mol_type = other DNA

SEQ ID NO: 4236 - DNA, 1361 bp, synthetic construct; identical to SEQ ID NO: 1098
  misc_feature 1..1361: note = Synthetic
  source 1..1361: mol_type = other DNA

SEQ ID NO: 4237 - DNA, 1376 bp, synthetic construct; identical to SEQ ID NO: 1099
  misc_feature 1..1376: note = Synthetic
  source 1..1376: mol_type = other DNA

SEQ ID NO: 4238 - DNA, 1337 bp, synthetic construct; identical to SEQ ID NO: 1100
  misc_feature 1..1337: note = Synthetic
  source 1..1337: mol_type = other DNA

SEQ ID NO: 4239 - DNA, 1361 bp, synthetic construct; identical to SEQ ID NO: 1101
  misc_feature 1..1361: note = Synthetic
  source 1..1361: mol_type = other DNA

SEQ ID NO: 4240 - DNA, 1361 bp, synthetic construct; identical to SEQ ID NO: 1102
  misc_feature 1..1361: note = Synthetic
  source 1..1361: mol_type = other DNA

SEQ ID NO: 4241 - DNA, 1349 bp, synthetic construct; identical to SEQ ID NO: 1103
  misc_feature 1..1349: note = Synthetic
  source 1..1349: mol_type = other DNA

SEQ ID NO: 4242 - DNA, 1373 bp, synthetic construct; identical to SEQ ID NO: 1104
  misc_feature 1..1373: note = Synthetic
  source 1..1373: mol_type = other DNA

SEQ ID NO: 4243 - DNA, 1355 bp, synthetic construct; identical to SEQ ID NO: 1105
  misc_feature 1..1355: note = Synthetic
  source 1..1355: mol_type = other DNA

SEQ ID NO: 4244 - DNA, 1352 bp, synthetic construct; identical to SEQ ID NO: 1106
  misc_feature 1..1352: note = Synthetic
  source 1..1352: mol_type = other DNA

SEQ ID NO: 4245 - DNA, 1364 bp, synthetic construct; identical to SEQ ID NO: 1107
  misc_feature 1..1364: note = Synthetic
  source 1..1364: mol_type = other DNA

SEQ ID NO: 4246 - DNA, 1364 bp, synthetic construct; identical to SEQ ID NO: 1108
  misc_feature 1..1364: note = Synthetic
  source 1..1364: mol_type = other DNA

SEQ ID NO: 4247 - DNA, 1355 bp, synthetic construct; identical to SEQ ID NO: 1109
  misc_feature 1..1355: note = Synthetic
  source 1..1355: mol_type = other DNA

SEQ ID NO: 4248 - DNA, 1355 bp, synthetic construct; identical to SEQ ID NO: 1110
  misc_feature 1..1355: note = Synthetic
  source 1..1355: mol_type = other DNA

SEQ ID NO: 4249 - DNA, 1352 bp, synthetic construct; identical to SEQ ID NO: 1111
  misc_feature 1..1352: note = Synthetic
  source 1..1352: mol_type = other DNA

SEQ ID NO: 4250 - DNA, 1355 bp, synthetic construct; identical to SEQ ID NO: 1112
  misc_feature 1..1355: note = Synthetic
  source 1..1355: mol_type = other DNA

SEQ ID NO: 4251 - DNA, 1361 bp, synthetic construct; identical to SEQ ID NO: 1113
  misc_feature 1..1361: note = Synthetic
  source 1..1361: mol_type = other DNA

SEQ ID NO: 4252 - DNA, 1361 bp, synthetic construct; identical to SEQ ID NO: 1114
  misc_feature 1..1361: note = Synthetic
  source 1..1361: mol_type = other DNA

SEQ ID NO: 4253 - DNA, 1361 bp, synthetic construct; identical to SEQ ID NO: 1115
  misc_feature 1..1361: note = Synthetic
  source 1..1361: mol_type = other DNA

SEQ ID NO: 4254 - DNA, 1343 bp, synthetic construct; identical to SEQ ID NO: 1116
  misc_feature 1..1343: note = Synthetic
  source 1..1343: mol_type = other DNA

SEQ ID NO: 4255 - DNA, 1361 bp, synthetic construct; identical to SEQ ID NO: 1117
  misc_feature 1..1361: note = Synthetic
  source 1..1361: mol_type = other DNA

SEQ ID NO: 4256 - DNA, 1355 bp, synthetic construct; identical to SEQ ID NO: 1118
  misc_feature 1..1355: note = Synthetic
  source 1..1355: mol_type = other DNA

SEQ ID NO: 4257 - DNA, 1343 bp, synthetic construct; identical to SEQ ID NO: 1119
  misc_feature 1..1343: note = Synthetic
  source 1..1343: mol_type = other DNA

SEQ ID NO: 4258 - DNA, 1343 bp, synthetic construct; identical to SEQ ID NO: 1120
  misc_feature 1..1343: note = Synthetic
  source 1..1343: mol_type = other DNA

SEQ ID NO: 4259 - DNA, 1343 bp, synthetic construct; identical to SEQ ID NO: 1121
  misc_feature 1..1343: note = Synthetic
  source 1..1343: mol_type = other DNA

SEQ ID NO: 4260 - DNA, 1361 bp, synthetic construct; identical to SEQ ID NO: 1122
  misc_feature 1..1361: note = Synthetic
  source 1..1361: mol_type = other DNA

SEQ ID NO: 4261 - DNA, 1343 bp, synthetic construct; identical to SEQ ID NO: 1123
  misc_feature 1..1343: note = Synthetic
  source 1..1343: mol_type = other DNA

SEQ ID NO: 4262 - DNA, 1361 bp, synthetic construct; identical to SEQ ID NO: 1124
  misc_feature 1..1361: note = Synthetic
  source 1..1361: mol_type = other DNA

SEQ ID NO: 4263 - DNA, 1376 bp, synthetic construct; identical to SEQ ID NO: 1125
  misc_feature 1..1376: note = Synthetic
  source 1..1376: mol_type = other DNA

SEQ ID NO: 4264 - DNA, 1337 bp, synthetic construct; identical to SEQ ID NO: 1126
  misc_feature 1..1337: note = Synthetic
  source 1..1337: mol_type = other DNA

SEQ ID NO: 4265 - DNA, 1361 bp, synthetic construct; identical to SEQ ID NO: 1127
  misc_feature 1..1361: note = Synthetic
  source 1..1361: mol_type = other DNA

SEQ ID NO: 4266 - DNA, 1361 bp, synthetic construct; identical to SEQ ID NO: 1128
  misc_feature 1..1361: note = Synthetic
  source 1..1361: mol_type = other DNA

SEQ ID NO: 4267 - DNA, 1349 bp, synthetic construct; identical to SEQ ID NO: 1129
  misc_feature 1..1349: note = Synthetic
  source 1..1349: mol_type = other DNA

SEQ ID NO: 4268 - DNA, 1373 bp, synthetic construct; identical to SEQ ID NO: 1130
  misc_feature 1..1373: note = Synthetic
  source 1..1373: mol_type = other DNA

SEQ ID NO: 4269 - DNA, 1355 bp, synthetic construct; identical to SEQ ID NO: 1131
  misc_feature 1..1355: note = Synthetic
  source 1..1355: mol_type = other DNA

SEQ ID NO: 4270 - DNA, 1352 bp, synthetic construct; identical to SEQ ID NO: 1132
  misc_feature 1..1352: note = Synthetic
  source 1..1352: mol_type = other DNA

SEQ ID NO: 4271 - DNA, 1364 bp, synthetic construct; identical to SEQ ID NO: 1133
  misc_feature 1..1364: note = Synthetic
  source 1..1364: mol_type = other DNA

SEQ ID NO: 4272 - DNA, 1364 bp, synthetic construct; identical to SEQ ID NO: 1134
  misc_feature 1..1364: note = Synthetic
  source 1..1364: mol_type = other DNA

SEQ ID NO: 4273 - DNA, 1355 bp, synthetic construct; identical to SEQ ID NO: 1135
  misc_feature 1..1355: note = Synthetic
  source 1..1355: mol_type = other DNA

SEQ ID NO: 4274 - DNA, 1355 bp, synthetic construct; identical to SEQ ID NO: 1136
  misc_feature 1..1355: note = Synthetic
  source 1..1355: mol_type = other DNA

SEQ ID NO: 4275 - DNA, 1352 bp, synthetic construct; identical to SEQ ID NO: 1137
  misc_feature 1..1352: note = Synthetic
  source 1..1352: mol_type = other DNA

SEQ ID NO: 4276 - DNA, 1355 bp, synthetic construct; identical to SEQ ID NO: 1138
  misc_feature 1..1355: note = Synthetic
  source 1..1355: mol_type = other DNA

SEQ ID NO: 4277 - protein, 687 aa, synthetic construct
  REGION 1..687: note = Synthetic
MALPVTALLLPLALLLHAARGGGGSGGGGSQVQLVESGGGVVQPGRSLRLSCAASGFTFNNYDMYWVRQAPGKGLEWVAVTWYDGSNKYYADSVKGRFTISRDNSKNTLYLQMNSLRAEDTAVYYCARGDNWNDEHHYFYYMDVWGKGTTVTVSSGGGGSGGGGSGGGGSEIVLTQSPDFQSVTPKEKVTITCRASQSIGSSLHWYQQKPDQSPKLLIKFASQSFSGVPSRFSGSGSGTDFTLTIHSLEAEDAATYYCHQSSSLPWTFGQGTKVEIKESKYGPPCPSCPIYIWAPLAGTCGVLLLSLVITLYCRRDQRLPPDAHKPPGGGSFRTPIQEEQADAHSTLAKIRVKFSRSADAPAYQQGQNQLYNELNLGRREEYDVLDKRRGRDPEMGGKPRRKNPQEGLYNELQKDKMAEAYSEIGMKGERRRGKGHDGLYQGLSTATKDTYDALHMQALPPRGSGEGRGSLLTCGDVEENPGPMALPVTALLLPLALLLHAARPNWVNVISDLKKIEDLIQSMHIDATLYTESDVHPSCKVTAMKCFLLELQVISLESGDASIHDTVENLIILANNSLSSNGNVTESGCKECEELEEKNIKEFLQSFVHIVQMFINTSTTTPAPRPPTPAPTIASQPLSLRPEACRPAAGGAVHTRGLDFACDIYIWAPLAGTCGVLLLSLVITLYC

SEQ ID NO: 4278 - protein, 687 aa, synthetic construct
  REGION 1..687: note = Synthetic
MALPVTALLLPLALLLHAARGGGGSGGGGSQVQLVESGGGVVQPGRSLRLSCAASGFTFSNYDMHWVRQAPGKGLEWVTIIWHDASNKYYLDSVKGRFTISRDNSKNTLYLQMNSLRAEDTAVYYCARGDNWNDEHHYFYYMDVWGKGTTVTVSSGGGGSGGGGSGGGGSEIVLTQSPDFQSVTPKEKVTITCRASQSIGSSLHWYQQKPDQSPKLLIKFASQSFSGVPSRFSGSGSGTDFTLTIHSLEAEDAATYYCHQSSSLPWTFGQGTKVEIKESKYGPPCPSCPIYIWAPLAGTCGVLLLSLVITLYCRRDQRLPPDAHKPPGGGSFRTPIQEEQADAHSTLAKIRVKFSRSADAPAYQQGQNQLYNELNLGRREEYDVLDKRRGRDPEMGGKPRRKNPQEGLYNELQKDKMAEAYSEIGMKGERRRGKGHDGLYQGLSTATKDTYDALHMQALPPRGSGEGRGSLLTCGDVEENPGPMALPVTALLLPLALLLHAARPNWVNVISDLKKIEDLIQSMHIDATLYTESDVHPSCKVTAMKCFLLELQVISLESGDASIHDTVENLIILANNSLSSNGNVTESGCKECEELEEKNIKEFLQSFVHIVQMFINTSTTTPAPRPPTPAPTIASQPLSLRPEACRPAAGGAVHTRGLDFACDIYIWAPLAGTCGVLLLSLVITLYC

SEQ ID NO: 4279 - protein, 678 aa, synthetic construct; identical to SEQ ID NO: 1141
  REGION 1..678: note = Synthetic

SEQ ID NO: 4280 - protein, 672 aa, synthetic construct; identical to SEQ ID NO: 1142
  REGION 1..672: note = Synthetic

SEQ ID NO: 4281 - protein, 678 aa, synthetic construct; identical to SEQ ID NO: 1143
  REGION 1..678: note = Synthetic

SEQ ID NO: 4282 - protein, 676 aa, synthetic construct; identical to SEQ ID NO: 1144
  REGION 1..676: note = Synthetic

SEQ ID NO: 4283 - protein, 672 aa, synthetic construct; identical to SEQ ID NO: 1145
  REGION 1..672: note = Synthetic

SEQ ID NO: 4284 - protein, 672 aa, synthetic construct; identical to SEQ ID NO: 1146
  REGION 1..672: note = Synthetic

SEQ ID NO: 4285 - protein, 672 aa, synthetic construct; identical to SEQ ID NO: 1147
  REGION 1..672: note = Synthetic

SEQ ID NO: 4286 - protein, 678 aa, synthetic construct; identical to SEQ ID NO: 1148
  REGION 1..678: note = Synthetic

SEQ ID NO: 4287 - protein, 672 aa, synthetic construct; identical to SEQ ID NO: 1149
  REGION 1..672: note = Synthetic

SEQ ID NO: 4288 - protein, 678 aa, synthetic construct; identical to SEQ ID NO: 1150
  REGION 1..678: note = Synthetic

SEQ ID NO: 4289 - protein, 683 aa, synthetic construct; identical to SEQ ID NO: 1151
  REGION 1..683: note = Synthetic

SEQ ID NO: 4290 - protein, 670 aa, synthetic construct; identical to SEQ ID NO: 1152
  REGION 1..670: note = Synthetic

SEQ ID NO: 4291 - protein, 678 aa, synthetic construct; identical to SEQ ID NO: 1153
  REGION 1..678: note = Synthetic

SEQ ID NO: 4292 - protein, 678 aa, synthetic construct; identical to SEQ ID NO: 1154
  REGION 1..678: note = Synthetic

SEQ ID NO: 4293 - protein, 674 aa, synthetic construct; identical to SEQ ID NO: 1155
  REGION 1..674: note = Synthetic

SEQ ID NO: 4294 - protein, 682 aa, synthetic construct; identical to SEQ ID NO: 1156
  REGION 1..682: note = Synthetic

SEQ ID NO: 4295 - protein, 676 aa, synthetic construct; identical to SEQ ID NO: 1157
  REGION 1..676: note = Synthetic

SEQ ID NO: 4296 - protein, 675 aa, synthetic construct; identical to SEQ ID NO: 1158
  REGION 1..675: note = Synthetic

SEQ ID NO: 4297 - protein, 679 aa, synthetic construct; identical to SEQ ID NO: 1159
  REGION 1..679: note = Synthetic

SEQ ID NO: 4298 - protein, 679 aa, synthetic construct; identical to SEQ ID NO: 1160
  REGION 1..679: note = Synthetic

SEQ ID NO: 4299 - protein, 676 aa, synthetic construct; identical to SEQ ID NO: 1161
  REGION 1..676: note = Synthetic

SEQ ID NO: 4300 - protein, 676 aa, synthetic construct; identical to SEQ ID NO: 1162
  REGION 1..676: note = Synthetic

SEQ ID NO: 4301 - protein, 675 aa, synthetic construct; identical to SEQ ID NO: 1163
  REGION 1..675: note = Synthetic

SEQ ID NO: 4302 - protein, 676 aa, synthetic construct; identical to SEQ ID NO: 1164
  REGION 1..676: note = Synthetic

SEQ ID NO: 4303 - DNA, 2037 bp, synthetic construct; identical to SEQ ID NO: 1165
  misc_feature 1..2037: note = Synthetic
  source 1..2037: mol_type = other DNA

SEQ ID NO: 4304 - DNA, 2037 bp, synthetic construct; identical to SEQ ID NO: 1166
  misc_feature 1..2037: note = Synthetic
  source 1..2037: mol_type = other DNA

SEQ ID NO: 4305 - DNA, 2037 bp, synthetic construct; identical to SEQ ID NO: 1167
  misc_feature 1..2037: note = Synthetic
  source 1..2037: mol_type = other DNA

SEQ ID NO: 4306 - DNA, 2019 bp, synthetic construct; identical to SEQ ID NO: 1168
  misc_feature 1..2019: note = Synthetic
  source 1..2019: mol_type = other DNA

SEQ ID NO: 4307 - DNA, 2037 bp, synthetic construct; identical to SEQ ID NO: 1169
  misc_feature 1..2037: note = Synthetic
  source 1..2037: mol_type = other DNA

SEQ ID NO: 4308 - DNA, 2031 bp, synthetic construct; identical to SEQ ID NO: 1170
  misc_feature 1..2031: note = Synthetic
  source 1..2031: mol_type = other DNA

SEQ ID NO: 4309 - DNA, 2019 bp, synthetic construct; identical to SEQ ID NO: 1171
  misc_feature 1..2019: note = Synthetic
  source 1..2019: mol_type = other DNA

SEQ ID NO: 4310 - DNA, 2019 bp, synthetic construct; identical to SEQ ID NO: 1172
  misc_feature 1..2019: note = Synthetic
  source 1..2019: mol_type = other DNA

SEQ ID NO: 4311 - DNA, 2019 bp, synthetic construct; identical to SEQ ID NO: 1173
  misc_feature 1..2019: note = Synthetic
  source 1..2019: mol_type = other DNA

SEQ ID NO: 4312 - DNA, 2037 bp, synthetic construct; identical to SEQ ID NO: 1174
  misc_feature 1..2037: note = Synthetic
  source 1..2037: mol_type = other DNA

SEQ ID NO: 4313 - DNA, 2019 bp, synthetic construct; identical to SEQ ID NO: 1175
  misc_feature 1..2019: note = Synthetic
  source 1..2019: mol_type = other DNA

SEQ ID NO: 4314 - DNA, 2037 bp, synthetic construct; identical to SEQ ID NO: 1176
  misc_feature 1..2037: note = Synthetic
  source 1..2037: mol_type = other DNA

SEQ ID NO: 4315 - DNA, 2052 bp, synthetic construct; identical to SEQ ID NO: 1177
  misc_feature 1..2052: note = Synthetic
  source 1..2052: mol_type = other DNA

SEQ ID NO: 4316 - DNA, 2013 bp, synthetic construct; identical to SEQ ID NO: 1178
  misc_feature 1..2013: note = Synthetic
  source 1..2013: mol_type = other DNA

SEQ ID NO: 4317 - DNA, 2037 bp, synthetic construct; identical to SEQ ID NO: 1179
  misc_feature 1..2037: note = Synthetic
  source 1..2037: mol_type = other DNA

SEQ ID NO: 4318 - DNA, 2037 bp, synthetic construct; identical to SEQ ID NO: 1180
  misc_feature 1..2037: note = Synthetic
  source 1..2037: mol_type = other DNA

SEQ ID NO: 4319 - DNA, 2025 bp, synthetic construct; identical to SEQ ID NO: 1181
  misc_feature 1..2025: note = Synthetic
  source 1..2025: mol_type = other DNA

SEQ ID NO: 4320 - DNA, 2049 bp, synthetic construct; identical to SEQ ID NO: 1182
  misc_feature 1..2049: note = Synthetic
  source 1..2049: mol_type = other DNA

SEQ ID NO: 4321 - DNA, 2031 bp, synthetic construct; identical to SEQ ID NO: 1183
  misc_feature 1..2031: note = Synthetic
  source 1..2031: mol_type = other DNA

SEQ ID NO: 4322 - DNA, 2028 bp, synthetic construct; identical to SEQ ID NO: 1184
  misc_feature 1..2028: note = Synthetic
  source 1..2028: mol_type = other DNA

SEQ ID NO: 4323 - DNA, 2040 bp, synthetic construct; identical to SEQ ID NO: 1185
  misc_feature 1..2040: note = Synthetic
  source 1..2040: mol_type = other DNA

SEQ ID NO: 4324 - DNA, 2040 bp, synthetic construct; identical to SEQ ID NO: 1186
  misc_feature 1..2040: note = Synthetic
  source 1..2040: mol_type = other DNA

SEQ ID NO: 4325 - DNA, 2031 bp, synthetic construct; identical to SEQ ID NO: 1187
  misc_feature 1..2031: note = Synthetic
  source 1..2031: mol_type = other DNA

SEQ ID NO: 4326 - DNA, 2031 bp, synthetic construct; identical to SEQ ID NO: 1188
  misc_feature 1..2031: note = Synthetic
  source 1..2031: mol_type = other DNA

SEQ ID NO: 4327 - DNA, 2028 bp, synthetic construct; identical to SEQ ID NO: 1189
  misc_feature 1..2028: note = Synthetic
  source 1..2028: mol_type = other DNA

SEQ ID NO: 4328 - DNA, 2031 bp, synthetic construct; identical to SEQ ID NO: 1190
  misc_feature 1..2031: note = Synthetic
  source 1..2031: mol_type = other DNA

SEQ ID NO: 4329 - DNA, 2037 bp, synthetic construct; identical to SEQ ID NO: 1191
  misc_feature 1..2037: note = Synthetic
  source 1..2037: mol_type = other DNA

SEQ ID NO: 4330 - DNA, 2037 bp, synthetic construct; identical to SEQ ID NO: 1192
  misc_feature 1..2037: note = Synthetic
  source 1..2037: mol_type = other DNA

SEQ ID NO: 4331 - DNA, 2037 bp, synthetic construct; identical to SEQ ID NO: 1193
  misc_feature 1..2037: note = Synthetic
  source 1..2037: mol_type = other DNA

SEQ ID NO: 4332 - DNA, 2019 bp, synthetic construct; identical to SEQ ID NO: 1194
  misc_feature 1..2019: note = Synthetic
  source 1..2019: mol_type = other DNA

SEQ ID NO: 4333 - DNA, 2037 bp, synthetic construct; identical to SEQ ID NO: 1195
  misc_feature 1..2037: note = Synthetic
  source 1..2037: mol_type = other DNA

SEQ ID NO: 4334 - DNA, 2031 bp, synthetic construct; identical to SEQ ID NO: 1196
  misc_feature 1..2031: note = Synthetic
  source 1..2031: mol_type = other DNA

SEQ ID NO: 4335 - DNA, 2019 bp, synthetic construct; identical to SEQ ID NO: 1197
  misc_feature 1..2019: note = Synthetic
  source 1..2019: mol_type = other DNA

SEQ ID NO: 4336 - DNA, 2019 bp, synthetic construct; identical to SEQ ID NO: 1198
  misc_feature 1..2019: note = Synthetic
  source 1..2019: mol_type = other DNA

SEQ ID NO: 4337 - DNA, 2019 bp, synthetic construct; identical to SEQ ID NO: 1199
  misc_feature 1..2019: note = Synthetic
  source 1..2019: mol_type = other DNA

SEQ ID NO: 4338 - DNA, 2037 bp, synthetic construct; identical to SEQ ID NO: 1200
  misc_feature 1..2037: note = Synthetic
  source 1..2037: mol_type = other DNA

SEQ ID NO: 4339 - DNA, 2019 bp, synthetic construct; identical to SEQ ID NO: 1201
  misc_feature 1..2019: note = Synthetic
  source 1..2019: mol_type = other DNA

SEQ ID NO: 4340 - DNA, 2037 bp, synthetic construct; identical to SEQ ID NO: 1202
  misc_feature 1..2037: note = Synthetic
  source 1..2037: mol_type = other DNA

SEQ ID NO: 4341 - DNA, 2052 bp, synthetic construct; identical to SEQ ID NO: 1203
  misc_feature 1..2052: note = Synthetic
  source 1..2052: mol_type = other DNA

SEQ ID NO: 4342 - DNA, 2013 bp, synthetic construct; identical to SEQ ID NO: 1204
  misc_feature 1..2013: note = Synthetic
  source 1..2013: mol_type = other DNA

SEQ ID NO: 4343 - DNA, 2037 bp, synthetic construct; identical to SEQ ID NO: 1205
  misc_feature 1..2037: note = Synthetic
  source 1..2037: mol_type = other DNA

SEQ ID NO: 4344 - DNA, 2037 bp, synthetic construct; identical to SEQ ID NO: 1206
  misc_feature 1..2037: note = Synthetic
  source 1..2037: mol_type = other DNA

SEQ ID NO: 4345 - DNA, 2025 bp, synthetic construct; identical to SEQ ID NO: 1207
  misc_feature 1..2025: note = Synthetic
  source 1..2025: mol_type = other DNA

SEQ ID NO: 4346 - DNA, 2049 bp, synthetic construct; identical to SEQ ID NO: 1208
  misc_feature 1..2049: note = Synthetic
  source 1..2049: mol_type = other DNA

SEQ ID NO: 4347 - DNA, 2031 bp, synthetic construct; identical to SEQ ID NO: 1209
  misc_feature 1..2031: note = Synthetic
  source 1..2031: mol_type = other DNA

SEQ ID NO: 4348 - DNA, 2028 bp, synthetic construct; identical to SEQ ID NO: 1210
  misc_feature 1..2028: note = Synthetic
  source 1..2028: mol_type = other DNA

SEQ ID NO: 4349 - DNA, 2040 bp, synthetic construct; identical to SEQ ID NO: 1211
  misc_feature 1..2040: note = Synthetic
  source 1..2040: mol_type = other DNA

SEQ ID NO: 4350 - DNA, 2040 bp, synthetic construct; identical to SEQ ID NO: 1212
  misc_feature 1..2040: note = Synthetic
  source 1..2040: mol_type = other DNA

SEQ ID NO: 4351 - DNA, 2031 bp, synthetic construct; identical to SEQ ID NO: 1213
  misc_feature 1..2031: note = Synthetic
  source 1..2031: mol_type = other DNA

SEQ ID NO: 4352 - DNA, 2031 bp, synthetic construct; identical to SEQ ID NO: 1214
  misc_feature 1..2031: note = Synthetic
  source 1..2031: mol_type = other DNA

SEQ ID NO: 4353 - DNA, 2028 bp, synthetic construct; identical to SEQ ID NO: 1215
  misc_feature 1..2028: note = Synthetic
  source 1..2028: mol_type = other DNA

SEQ ID NO: 4354 - DNA, 2031 bp, synthetic construct; identical to SEQ ID NO: 1216
  misc_feature 1..2031: note = Synthetic
  source 1..2031: mol_type = other DNA

SEQ ID NO: 4355 - protein, 546 aa, synthetic construct; identical to SEQ ID NO: 1217
  REGION 1..546: note = Synthetic

SEQ ID NO: 4356 - protein, 546 aa, synthetic construct; identical to SEQ ID NO: 1218
  REGION 1..546: note = Synthetic

SEQ ID NO: 4357 - protein, 546 aa, synthetic construct; identical to SEQ ID NO: 1219
  REGION 1..546: note = Synthetic

SEQ ID NO: 4358 - protein, 540 aa, synthetic construct; identical to SEQ ID NO: 1220
  REGION 1..540: note = Synthetic

SEQ ID NO: 4359 - protein, 546 aa, synthetic construct; identical to SEQ ID NO: 1221
  REGION 1..546: note = Synthetic

SEQ ID NO: 4360 - protein, 544 aa, synthetic construct; identical to SEQ ID NO: 1222
  REGION 1..544: note = Synthetic

SEQ ID NO: 4361 - protein, 540 aa, synthetic construct; identical to SEQ ID NO: 1223
  REGION 1..540: note = Synthetic

SEQ ID NO: 4362 - protein, 540 aa, synthetic construct; identical to SEQ ID NO: 1224
  REGION 1..540: note = Synthetic

SEQ ID NO: 4363 - protein, 540 aa, synthetic construct; identical to SEQ ID NO: 1225
  REGION 1..540: note = Synthetic

SEQ ID NO: 4364 - protein, 546 aa, synthetic construct; identical to SEQ ID NO: 1226
  REGION 1..546: note = Synthetic

SEQ ID NO: 4365 - protein, 540 aa, synthetic construct; identical to SEQ ID NO: 1227
  REGION 1..540: note = Synthetic

SEQ ID NO: 4366 - protein, 546 aa, synthetic construct; identical to SEQ ID NO: 1228
  REGION 1..546: note = Synthetic

SEQ ID NO: 4367 - protein, 551 aa, synthetic construct; identical to SEQ ID NO: 1229
  REGION 1..551: note = Synthetic

SEQ ID NO: 4368 - protein, 538 aa, synthetic construct; identical to SEQ ID NO: 1230
  REGION 1..538: note = Synthetic

SEQ ID NO: 4369 - protein, 546 aa, synthetic construct; identical to SEQ ID NO: 1231
  REGION 1..546: note = Synthetic

SEQ ID NO: 4370 - protein, 546 aa, synthetic construct; identical to SEQ ID NO: 1232
  REGION 1..546: note = Synthetic

SEQ ID NO: 4371 - protein, 542 aa, synthetic construct; identical to SEQ ID NO: 1233
  REGION 1..542: note = Synthetic

SEQ ID NO: 4372 - protein, 550 aa, synthetic construct; identical to SEQ ID NO: 1234
  REGION 1..550: note = Synthetic

SEQ ID NO: 4373 - protein, 544 aa, synthetic construct; identical to SEQ ID NO: 1235
  REGION 1..544: note = Synthetic

SEQ ID NO: 4374 - protein, 543 aa, synthetic construct; identical to SEQ ID NO: 1236
  REGION 1..543: note = Synthetic

SEQ ID NO: 4375 - protein, 547 aa, synthetic construct; identical to SEQ ID NO: 1237
  REGION 1..547: note = Synthetic

SEQ ID NO: 4376 - protein, 547 aa, synthetic construct; identical to SEQ ID NO: 1238
  REGION 1..547: note = Synthetic

SEQ ID NO: 4377 - protein, 544 aa, synthetic construct; identical to SEQ ID NO: 1239
  REGION 1..544: note = Synthetic

SEQ ID NO: 4378 - protein, 544 aa, synthetic construct; identical to SEQ ID NO: 1240
  REGION 1..544: note = Synthetic

SEQ ID NO: 4379 - protein, 543 aa, synthetic construct; identical to SEQ ID NO: 1241
  REGION 1..543: note = Synthetic

SEQ ID NO: 4380 - protein, 544 aa, synthetic construct; identical to SEQ ID NO: 1242
  REGION 1..544: note = Synthetic

SEQ ID NO: 4381 - DNA, 1640 bp, synthetic construct; identical to SEQ ID NO: 1243
  misc_feature 1..1640: note = Synthetic
  source 1..1640: mol_type = other DNA

SEQ ID NO: 4382 - DNA, 1640 bp, synthetic construct; identical to SEQ ID NO: 1244
  misc_feature 1..1640: note = Synthetic
  source 1..1640: mol_type = other DNA

SEQ ID NO: 4383 - DNA, 1640 bp, synthetic construct; identical to SEQ ID NO: 1245
  misc_feature 1..1640: note = Synthetic
  source 1..1640: mol_type = other DNA

SEQ ID NO: 4384 - DNA, 1622 bp, synthetic construct; identical to SEQ ID NO: 1246
  misc_feature 1..1622: note = Synthetic
  source 1..1622: mol_type = other DNA

SEQ ID NO: 4385 - DNA, 1640 bp, synthetic construct; identical to SEQ ID NO: 1247
  misc_feature 1..1640: note = Synthetic
  source 1..1640: mol_type = other DNA

SEQ ID NO: 4386 - DNA, 1634 bp, synthetic construct; identical to SEQ ID NO: 1248
  misc_feature 1..1634: note = Synthetic
  source 1..1634: mol_type = other DNA

SEQ ID NO: 4387 - DNA, 1622 bp, synthetic construct; identical to SEQ ID NO: 1249
  misc_feature 1..1622: note = Synthetic
  source 1..1622: mol_type = other DNA

SEQ ID NO: 4388 - DNA, 1622 bp, synthetic construct; identical to SEQ ID NO: 1250
  misc_feature 1..1622: note = Synthetic
  source 1..1622: mol_type = other DNA

SEQ ID NO: 4389 - DNA, 1622 bp, synthetic construct; identical to SEQ ID NO: 1251
  misc_feature 1..1622: note = Synthetic
  source 1..1622: mol_type = other DNA

SEQ ID NO: 4390 - DNA, 1640 bp, synthetic construct; identical to SEQ ID NO: 1252
  misc_feature 1..1640: note = Synthetic
  source 1..1640: mol_type = other DNA

SEQ ID NO: 4391 - DNA, 1622 bp, synthetic construct; identical to SEQ ID NO: 1253
  misc_feature 1..1622: note = Synthetic
  source 1..1622: mol_type = other DNA

SEQ ID NO: 4392 - DNA, 1640 bp, synthetic construct; identical to SEQ ID NO: 1254
  misc_feature 1..1640: note = Synthetic
  source 1..1640: mol_type = other DNA

SEQ ID NO: 4393 - DNA, 1655 bp, synthetic construct; identical to SEQ ID NO: 1255
  misc_feature 1..1655: note = Synthetic
  source 1..1655: mol_type = other DNA

SEQ ID NO: 4394 - DNA, 1616 bp, synthetic construct; identical to SEQ ID NO: 1256
  misc_feature 1..1616: note = Synthetic
  source 1..1616: mol_type = other DNA

SEQ ID NO: 4395 - DNA, 1640 bp, synthetic construct; identical to SEQ ID NO: 1257
  misc_feature 1..1640: note = Synthetic
  source 1..1640: mol_type = other DNA

SEQ ID NO: 4396 - DNA, 1640 bp, synthetic construct; identical to SEQ ID NO: 1258
  misc_feature 1..1640: note = Synthetic
  source 1..1640: mol_type = other DNA

SEQ ID NO: 4397 - DNA, 1628 bp, synthetic construct; identical to SEQ ID NO: 1259
  misc_feature 1..1628: note = Synthetic
  source 1..1628: mol_type = other DNA

SEQ ID NO: 4398 - DNA, 1652 bp, synthetic construct; identical to SEQ ID NO: 1260
  misc_feature 1..1652: note = Synthetic
  source 1..1652: mol_type = other DNA

SEQ ID NO: 4399 - DNA, 1634 bp, synthetic construct; identical to SEQ ID NO: 1261
  misc_feature 1..1634: note = Synthetic
  source 1..1634: mol_type = other DNA

SEQ ID NO: 4400 - DNA, 1631 bp, synthetic construct; identical to SEQ ID NO: 1262
  misc_feature 1..1631: note = Synthetic
  source 1..1631: mol_type = other DNA

SEQ ID NO: 4401 - DNA, 1643 bp, synthetic construct; identical to SEQ ID NO: 1263
  misc_feature 1..1643: note = Synthetic
  source 1..1643: mol_type = other DNA

SEQ ID NO: 4402 - DNA, 1643 bp, synthetic construct; identical to SEQ ID NO: 1264
  misc_feature 1..1643: note = Synthetic
  source 1..1643: mol_type = other DNA

SEQ ID NO: 4403 - DNA, 1634 bp, synthetic construct; identical to SEQ ID NO: 1265
  misc_feature 1..1634: note = Synthetic
  source 1..1634: mol_type = other DNA

SEQ ID NO: 4404 - DNA, 1634 bp, synthetic construct; identical to SEQ ID NO: 1266
  misc_feature 1..1634: note = Synthetic
  source 1..1634: mol_type = other DNA

SEQ ID NO: 4405 - DNA, 1631 bp, synthetic construct; identical to SEQ ID NO: 1267
  misc_feature 1..1631: note = Synthetic
  source 1..1631: mol_type = other DNA

SEQ ID NO: 4406 - DNA, 1634 bp, synthetic construct; identical to SEQ ID NO: 1268
  misc_feature 1..1634: note = Synthetic
  source 1..1634: mol_type = other DNA

SEQ ID NO: 4407 - DNA, 1640 bp, synthetic construct; identical to SEQ ID NO: 1269
  misc_feature 1..1640: note = Synthetic
  source 1..1640: mol_type = other DNA

SEQ ID NO: 4408 - DNA, 1640 bp, synthetic construct; identical to SEQ ID NO: 1270
  misc_feature 1..1640: note = Synthetic
  source 1..1640: mol_type = other DNA

SEQ ID NO: 4409 - DNA, 1640 bp, synthetic construct; identical to SEQ ID NO: 1271
  misc_feature 1..1640: note = Synthetic
  source 1..1640: mol_type = other DNA

SEQ ID NO: 4410 - DNA, 1622 bp, synthetic construct; identical to SEQ ID NO: 1272
  misc_feature 1..1622: note = Synthetic
  source 1..1622: mol_type = other DNA

SEQ ID NO: 4411 - DNA, 1640 bp, synthetic construct; identical to SEQ ID NO: 1273
  misc_feature 1..1640: note = Synthetic
  source 1..1640: mol_type = other DNA

SEQ ID NO: 4412 - DNA, 1634 bp, synthetic construct; identical to SEQ ID NO: 1274
  misc_feature 1..1634: note = Synthetic
  source 1..1634: mol_type = other DNA

SEQ ID NO: 4413 - DNA, 1622 bp, synthetic construct; identical to SEQ ID NO: 1275
  misc_feature 1..1622: note = Synthetic
  source 1..1622: mol_type = other DNA

SEQ ID NO: 4414 - DNA, 1622 bp, synthetic construct; identical to SEQ ID NO: 1276
  misc_feature 1..1622: note = Synthetic
  source 1..1622: mol_type = other DNA

SEQ ID NO: 4415 - DNA, 1622 bp, synthetic construct; identical to SEQ ID NO: 1277
  misc_feature 1..1622: note = Synthetic
  source 1..1622: mol_type = other DNA

SEQ ID NO: 4416 - DNA, 1640 bp, synthetic construct; identical to SEQ ID NO: 1278
  misc_feature 1..1640: note = Synthetic
  source 1..1640: mol_type = other DNA

SEQ ID NO: 4417 - DNA, 1622 bp, synthetic construct; identical to SEQ ID NO: 1279
  misc_feature 1..1622: note = Synthetic
  source 1..1622: mol_type = other DNA

SEQ ID NO: 4418 - DNA, 1640 bp, synthetic construct; identical to SEQ ID NO: 1280
  misc_feature 1..1640: note = Synthetic
  source 1..1640: mol_type = other DNA

SEQ ID NO: 4419 - DNA, 1655 bp, synthetic construct; identical to SEQ ID NO: 1281
  misc_feature 1..1655: note = Synthetic
  source 1..1655: mol_type = other DNA

SEQ ID NO: 4420 - DNA, 1616 bp, synthetic construct; identical to SEQ ID NO: 1282
  misc_feature 1..1616: note = Synthetic
  source 1..1616: mol_type = other DNA

SEQ ID NO: 4421 - DNA, 1640 bp, synthetic construct; identical to SEQ ID NO: 1283
  misc_feature 1..1640: note = Synthetic
  source 1..1640: mol_type = other DNA

SEQ ID NO: 4422 - DNA, 1640 bp, synthetic construct; identical to SEQ ID NO: 1284
  misc_feature 1..1640: note = Synthetic
  source 1..1640: mol_type = other DNA

SEQ ID NO: 4423 - DNA, 1628 bp, synthetic construct; identical to SEQ ID NO: 1285
  misc_feature 1..1628: note = Synthetic
  source 1..1628: mol_type = other DNA

SEQ ID NO: 4424 - DNA, 1652 bp, synthetic construct; identical to SEQ ID NO: 1286
  misc_feature 1..1652: note = Synthetic
  source 1..1652: mol_type = other DNA

SEQ ID NO: 4425 - DNA, 1634 bp, synthetic construct; identical to SEQ ID NO: 1287
  misc_feature 1..1634: note = Synthetic
  source 1..1634: mol_type = other DNA

SEQ ID NO: 4426 - DNA, 1631 bp, synthetic construct; identical to SEQ ID NO: 1288
  misc_feature 1..1631: note = Synthetic
  source 1..1631: mol_type = other DNA

SEQ ID NO: 4427 - DNA, 1643 bp, synthetic construct; identical to SEQ ID NO: 1289
  misc_feature 1..1643: note = Synthetic
  source 1..1643: mol_type = other DNA

SEQ ID NO: 4428 - DNA, 1643 bp, synthetic construct; identical to SEQ ID NO: 1290
  misc_feature 1..1643: note = Synthetic
  source 1..1643: mol_type = other DNA

SEQ ID NO: 4429 - DNA, 1634 bp, synthetic construct; identical to SEQ ID NO: 1291
  misc_feature 1..1634: note = Synthetic
  source 1..1634: mol_type = other DNA

SEQ ID NO: 4430 - DNA, 1634 bp, synthetic construct; identical to SEQ ID NO: 1292
  misc_feature 1..1634: note = Synthetic
  source 1..1634: mol_type = other DNA

SEQ ID NO: 4431 - DNA, 1631 bp, synthetic construct; identical to SEQ ID NO: 1293
  misc_feature 1..1631: note = Synthetic
  source 1..1631: mol_type = other DNA

SEQ ID NO: 4432 - DNA, 1634 bp, synthetic construct; identical to SEQ ID NO: 1294
  misc_feature 1..1634: note = Synthetic
  source 1..1634: mol_type = other DNA

SEQ ID NO: 4433 - protein, 771 aa, synthetic construct; identical to SEQ ID NO: 1295
  REGION 1..771: note = Synthetic

SEQ ID NO: 4434 - protein, 771 aa, synthetic construct; identical to SEQ ID NO: 1296
  REGION 1..771: note = Synthetic

SEQ ID NO: 4435 - protein, 771 aa, synthetic construct; identical to SEQ ID NO: 1297
  REGION 1..771: note = Synthetic

SEQ ID NO: 4436 - protein, 765 aa, synthetic construct; identical to SEQ ID NO: 1298
  REGION 1..765: note = Synthetic

SEQ ID NO: 4437 - protein, 771 aa, synthetic construct; identical to SEQ ID NO: 1299
  REGION 1..771: note = Synthetic

SEQ ID NO: 4438 - protein, 769 aa, synthetic construct; identical to SEQ ID NO: 1300
  REGION 1..769: note = Synthetic

SEQ ID NO: 4439 - protein, 765 aa, synthetic construct; identical to SEQ ID NO: 1301
  REGION 1..765: note = Synthetic

SEQ ID NO: 4440 - protein, 765 aa, synthetic construct; identical to SEQ ID NO: 1302
  REGION 1..765: note = Synthetic

SEQ ID NO: 4441 - protein, 765 aa, synthetic construct; identical to SEQ ID NO: 1303
  REGION 1..765: note = Synthetic

SEQ ID NO: 4442 - protein, 771 aa, synthetic construct; identical to SEQ ID NO: 1304
  REGION 1..771: note = Synthetic

SEQ ID NO: 4443 - protein, 765 aa, synthetic construct; identical to SEQ ID NO: 1305
  REGION 1..765: note = Synthetic

SEQ ID NO: 4444 - protein, 771 aa, synthetic construct; identical to SEQ ID NO: 1306
  REGION 1..771: note = Synthetic

SEQ ID NO: 4445 - protein, 776 aa, synthetic construct; identical to SEQ ID NO: 1307
  REGION 1..776: note = Synthetic

SEQ ID NO: 4446 - protein, 763 aa, synthetic construct; identical to SEQ ID NO: 1308
  REGION 1..763: note = Synthetic

SEQ ID NO: 4447 - protein, 771 aa, synthetic construct; identical to SEQ ID NO: 1309
  REGION 1..771: note = Synthetic

SEQ ID NO: 4448 - protein, 771 aa, synthetic construct; identical to SEQ ID NO: 1310
  REGION 1..771: note = Synthetic

SEQ ID NO: 4449 - protein, 767 aa, synthetic construct; identical to SEQ ID NO: 1311
  REGION 1..767: note = Synthetic

SEQ ID NO: 4450 - protein, 775 aa, synthetic construct; identical to SEQ ID NO: 1312
  REGION 1..775: note = Synthetic

SEQ ID NO: 4451 - protein, 769 aa, synthetic construct; identical to SEQ ID NO: 1313
  REGION 1..769: note = Synthetic

SEQ ID NO: 4452 - protein, 768 aa, synthetic construct; identical to SEQ ID NO: 1314
  REGION 1..768: note = Synthetic

SEQ ID NO: 4453 - protein, 772 aa, synthetic construct; identical to SEQ ID NO: 1315
  REGION 1..772: note = Synthetic

SEQ ID NO: 4454 - protein, 772 aa, synthetic construct; identical to SEQ ID NO: 1316
  REGION 1..772: note = Synthetic

SEQ ID NO: 4455 - protein, 769 aa, synthetic construct; identical to SEQ ID NO: 1317
  REGION 1..769: note = Synthetic

SEQ ID NO: 4456 - protein, 769 aa, synthetic construct; identical to SEQ ID NO: 1318
  REGION 1..769: note = Synthetic

SEQ ID NO: 4457 - protein, 768 aa, synthetic construct; identical to SEQ ID NO: 1319
  REGION 1..768: note = Synthetic

SEQ ID NO: 4458 - protein, 769 aa, synthetic construct; identical to SEQ ID NO: 1320
  REGION 1..769: note = Synthetic

SEQ ID NO: 4459 - DNA, 2316 bp, synthetic construct; identical to SEQ ID NO: 1321
  misc_feature 1..2316: note = Synthetic
  source 1..2316: mol_type = other DNA

SEQ ID NO: 4460 - DNA, 2316 bp, synthetic construct; identical to SEQ ID NO: 1322
  misc_feature 1..2316: note = Synthetic
  source 1..2316: mol_type = other DNA

SEQ ID NO: 4461 - DNA, 2316 bp, synthetic construct; identical to SEQ ID NO: 1323
  misc_feature 1..2316: note = Synthetic
  source 1..2316: mol_type = other DNA

SEQ ID NO: 4462 - DNA, 2298 bp, synthetic construct; identical to SEQ ID NO: 1324
  misc_feature 1..2298: note = Synthetic
  source 1..2298: mol_type = other DNA

SEQ ID NO: 4463 - DNA, 2316 bp, synthetic construct; identical to SEQ ID NO: 1325
  misc_feature 1..2316: note = Synthetic
  source 1..2316: mol_type = other DNA

SEQ ID NO: 4464 - DNA, 2310 bp, synthetic construct; identical to SEQ ID NO: 1326
  misc_feature 1..2310: note = Synthetic
  source 1..2310: mol_type = other DNA

SEQ ID NO: 4465 - DNA, 2298 bp, synthetic construct; identical to SEQ ID NO: 1327
  misc_feature 1..2298: note = Synthetic
  source 1..2298: mol_type = other DNA

SEQ ID NO: 4466 - DNA, 2298 bp, synthetic construct; identical to SEQ ID NO: 1328
  misc_feature 1..2298: note = Synthetic
  source 1..2298: mol_type = other DNA

SEQ ID NO: 4467 - DNA, 2298 bp, synthetic construct; identical to SEQ ID NO: 1329
  misc_feature 1..2298: note = Synthetic
  source 1..2298: mol_type = other DNA

SEQ ID NO: 4468 - DNA, 2316 bp, synthetic construct; identical to SEQ ID NO: 1330
  misc_feature 1..2316: note = Synthetic
  source 1..2316: mol_type = other DNA

SEQ ID NO: 4469 - DNA, 2298 bp, synthetic construct; identical to SEQ ID NO: 1331
  misc_feature 1..2298: note = Synthetic
  source 1..2298: mol_type = other DNA

SEQ ID NO: 4470 - DNA, 2316 bp, synthetic construct; identical to SEQ ID NO: 1332
  misc_feature 1..2316: note = Synthetic
  source 1..2316: mol_type = other DNA

SEQ ID NO: 4471 - DNA, 2331 bp, synthetic construct; identical to SEQ ID NO: 1333
  misc_feature 1..2331: note = Synthetic
  source 1..2331: mol_type = other DNA

SEQ ID NO: 4472 - DNA, 2292 bp, synthetic construct; identical to SEQ ID NO: 1334
  misc_feature 1..2292: note = Synthetic
  source 1..2292: mol_type = other DNA

SEQ ID NO: 4473 - DNA, 2316 bp, synthetic construct; identical to SEQ ID NO: 1335
  misc_feature 1..2316: note = Synthetic
  source 1..2316: mol_type = other DNA

SEQ ID NO: 4474 - DNA, 2316 bp, synthetic construct; identical to SEQ ID NO: 1336
  misc_feature 1..2316: note = Synthetic
  source 1..2316: mol_type = other DNA

SEQ ID NO: 4475 - DNA, 2304 bp, synthetic construct; identical to SEQ ID NO: 1337
  misc_feature 1..2304: note = Synthetic
  source 1..2304: mol_type = other DNA

SEQ ID NO: 4476 - DNA, 2328 bp, synthetic construct; identical to SEQ ID NO: 1338
  misc_feature 1..2328: note = Synthetic
  source 1..2328: mol_type = other DNA

SEQ ID NO: 4477 - DNA, 2310 bp, synthetic construct; identical to SEQ ID NO: 1339
  misc_feature 1..2310: note = Synthetic
  source 1..2310: mol_type = other DNA

SEQ ID NO: 4478 - DNA, 2307 bp, synthetic construct; identical to SEQ ID NO: 1340
  misc_feature 1..2307: note = Synthetic
  source 1..2307: mol_type = other DNA

SEQ ID NO: 4479 - DNA, 2319 bp, synthetic construct; identical to SEQ ID NO: 1341
  misc_feature 1..2319: note = Synthetic
  source 1..2319: mol_type = other DNA

SEQ ID NO: 4480 - DNA, 2319 bp, synthetic construct; identical to SEQ ID NO: 1342
  misc_feature 1..2319: note = Synthetic
  source 1..2319: mol_type = other DNA

SEQ ID NO: 4481 - DNA, 2310 bp, synthetic construct; identical to SEQ ID NO: 1343
  misc_feature 1..2310: note = Synthetic
  source 1..2310: mol_type = other DNA

SEQ ID NO: 4482 - DNA, 2310 bp, synthetic construct; identical to SEQ ID NO: 1344
  misc_feature 1..2310: note = Synthetic
  source 1..2310: mol_type = other DNA

SEQ ID NO: 4483 - DNA, 2307 bp, synthetic construct; identical to SEQ ID NO: 1345
  misc_feature 1..2307: note = Synthetic
  source 1..2307: mol_type = other DNA

SEQ ID NO: 4484 - DNA, 2310 bp, synthetic construct; identical to SEQ ID NO: 1346
  misc_feature 1..2310: note = Synthetic
  source 1..2310: mol_type = other DNA

SEQ ID NO: 4485 - DNA, 2316 bp, synthetic construct; identical to SEQ ID NO: 1347
  misc_feature 1..2316: note = Synthetic
  source 1..2316: mol_type = other DNA

SEQ ID NO: 4486 - DNA, 2316 bp, synthetic construct; identical to SEQ ID NO: 1348
  misc_feature 1..2316: note = Synthetic
  source 1..2316: mol_type = other DNA

SEQ ID NO: 4487 - DNA, 2316 bp, synthetic construct; identical to SEQ ID NO: 1349
  misc_feature 1..2316: note = Synthetic
  source 1..2316: mol_type = other DNA

SEQ ID NO: 4488 - DNA, 2298 bp, synthetic construct; identical to SEQ ID NO: 1350
  misc_feature 1..2298: note = Synthetic
  source 1..2298: mol_type = other DNA

SEQ ID NO: 4489 - DNA, 2316 bp, synthetic construct; identical to SEQ ID NO: 1351
  misc_feature 1..2316: note = Synthetic
  source 1..2316: mol_type = other DNA

SEQ ID NO: 4490 - DNA, 2310 bp, synthetic construct; identical to SEQ ID NO: 1352
  misc_feature 1..2310: note = Synthetic
  source 1..2310: mol_type = other DNA

SEQ ID NO: 4491 - DNA, 2298 bp, synthetic construct; identical to SEQ ID NO: 1353
  misc_feature 1..2298: note = Synthetic
  source 1..2298: mol_type = other DNA

SEQ ID NO: 4492 - DNA, 2298 bp, synthetic construct; identical to SEQ ID NO: 1354
  misc_feature 1..2298: note = Synthetic
  source 1..2298: mol_type = other DNA

SEQ ID NO: 4493 - DNA, 2298 bp, synthetic construct; identical to SEQ ID NO: 1355
  misc_feature 1..2298: note = Synthetic
  source 1..2298: mol_type = other DNA

SEQ ID NO: 4494 - DNA, 2316 bp, synthetic construct; identical to SEQ ID NO: 1356
  misc_feature 1..2316: note = Synthetic
  source 1..2316: mol_type = other DNA

SEQ ID NO: 4495 - DNA, 2298 bp, synthetic construct; identical to SEQ ID NO: 1357
  misc_feature 1..2298: note = Synthetic
  source 1..2298: mol_type = other DNA

SEQ ID NO: 4496 - DNA, 2316 bp, synthetic construct; identical to SEQ ID NO: 1358
  misc_feature 1..2316: note = Synthetic
  source 1..2316: mol_type = other DNA

SEQ ID NO: 4497 - DNA, 2331 bp, synthetic construct; identical to SEQ ID NO: 1359
  misc_feature 1..2331: note = Synthetic
  source 1..2331: mol_type = other DNA

SEQ ID NO: 4498 - DNA, 2292 bp, synthetic construct; identical to SEQ ID NO: 1360
  misc_feature 1..2292: note = Synthetic
  source 1..2292: mol_type = other DNA

SEQ ID NO: 4499 - DNA, 2316 bp, synthetic construct; identical to SEQ ID NO: 1361
  misc_feature 1..2316: note = Synthetic
  source 1..2316: mol_type = other DNA

SEQ ID NO: 4500 - DNA, 2316 bp, synthetic construct; identical to SEQ ID NO: 1362
  misc_feature 1..2316: note = Synthetic
  source 1..2316: mol_type = other DNA

SEQ ID NO: 4501 - DNA, 2304 bp, synthetic construct; identical to SEQ ID NO: 1363
  misc_feature 1..2304: note = Synthetic
  source 1..2304: mol_type = other DNA

SEQ ID NO: 4502 - DNA, 2328 bp, synthetic construct; identical to SEQ ID NO: 1364
  misc_feature 1..2328: note = Synthetic
  source 1..2328: mol_type = other DNA

SEQ ID NO: 4503 - DNA, 2310 bp, synthetic construct; identical to SEQ ID NO: 1365
  misc_feature 1..2310: note = Synthetic
  source 1..2310: mol_type = other DNA

SEQ ID NO: 4504 - DNA, 2307 bp, synthetic construct; identical to SEQ ID NO: 1366
  misc_feature 1..2307: note = Synthetic
  source 1..2307: mol_type = other DNA

SEQ ID NO: 4505 - DNA, 2319 bp, synthetic construct; identical to SEQ ID NO: 1367
  misc_feature 1..2319: note = Synthetic
  source 1..2319: mol_type = other DNA

SEQ ID NO: 4506 - DNA, 2319 bp, synthetic construct; identical to SEQ ID NO: 1368
  misc_feature 1..2319: note = Synthetic
  source 1..2319: mol_type = other DNA

SEQ ID NO: 4507 - DNA, 2310 bp, synthetic construct; identical to SEQ ID NO: 1369
  misc_feature 1..2310: note = Synthetic
  source 1..2310: mol_type = other DNA

SEQ ID NO: 4508 - DNA, 2310 bp, synthetic construct; identical to SEQ ID NO: 1370
  misc_feature 1..2310: note = Synthetic
  source 1..2310: mol_type = other DNA

SEQ ID NO: 4509 - DNA, 2307 bp, synthetic construct; identical to SEQ ID NO: 1371
  misc_feature 1..2307: note = Synthetic
  source 1..2307: mol_type = other DNA

SEQ ID NO: 4510 - DNA, 2310 bp, synthetic construct; identical to SEQ ID NO: 1372
  misc_feature 1..2310: note = Synthetic
  source 1..2310: mol_type = other DNA

SEQ ID NO: 4511 - protein, 21 aa, synthetic construct
  REGION 1..21: note = Synthetic
MALPVTALLLPLALLLHAARP

SEQ ID NO: 4512 - DNA, 63 bp, synthetic construct; identical to SEQ ID NO: 1374
  misc_feature 1..63: note = Synthetic
  source 1..63: mol_type = other DNA

SEQ ID NO: 4513 - protein, 486 aa, synthetic construct; identical to SEQ ID NO: 1924
  REGION 1..486: note = Synthetic

SEQ ID NO: 4514 - protein, 486 aa, synthetic construct; identical to SEQ ID NO: 1925
  REGION 1..486: note = Synthetic

SEQ ID NO: 4515 - protein, 485 aa, synthetic construct; identical to SEQ ID NO: 1926
  REGION 1..485: note = Synthetic

SEQ ID NO: 4516 - protein, 486 aa, synthetic construct; identical to SEQ ID NO: 1927
  REGION 1..486: note = Synthetic

SEQ ID NO: 4517 - protein, 479 aa, synthetic construct; identical to SEQ ID NO: 1928
  REGION 1..479: note = Synthetic

SEQ ID NO: 4518 - protein, 484 aa, synthetic construct; identical to SEQ ID NO: 1929
  REGION 1..484: note = Synthetic

SEQ ID NO: 4519 - protein, 486 aa, synthetic construct; identical to SEQ ID NO: 1930
  REGION 1..486: note = Synthetic

SEQ ID NO: 4520 - protein, 486 aa, synthetic construct; identical to SEQ ID NO: 1931
  REGION 1..486: note = Synthetic

SEQ ID NO: 4521 - protein, 487 aa, synthetic construct; identical to SEQ ID NO: 1932
  REGION 1..487: note = Synthetic

SEQ ID NO: 4522 - protein, 485 aa, synthetic construct; identical to SEQ ID NO: 1933
  REGION 1..485: note = Synthetic

SEQ ID NO: 4523 - protein, 486 aa, synthetic construct; identical to SEQ ID NO: 1934
  REGION 1..486: note = Synthetic

SEQ ID NO: 4524 - protein, 486 aa, synthetic construct; identical to SEQ ID NO: 1935
  REGION 1..486: note = Synthetic

SEQ ID NO: 4525 - protein, 491 aa, synthetic construct; identical to SEQ ID NO: 1936
  REGION 1..491: note = Synthetic

SEQ ID NO: 4526 - protein, 490 aa, synthetic construct; identical to SEQ ID NO: 1937
  REGION 1..490: note = Synthetic

SEQ ID NO: 4527 - protein, 488 aa, synthetic construct; identical to SEQ ID NO: 1938
  REGION 1..488: note = Synthetic

SEQ ID NO: 4528 - protein, 488 aa, synthetic construct; identical to SEQ ID NO: 1939
  REGION 1..488: note = Synthetic

SEQ ID NO: 4529 - protein, 486 aa, synthetic construct; identical to SEQ ID NO: 1940
  REGION 1..486: note = Synthetic

SEQ ID NO: 4530 - protein, 486 aa, synthetic construct; identical to SEQ ID NO: 1941
  REGION 1..486: note = Synthetic

SEQ ID NO: 4531 - protein, 487 aa, synthetic construct; identical to SEQ ID NO: 1942
  REGION 1..487: note = Synthetic

SEQ ID NO: 4532 - DNA, 1458 bp, synthetic construct; identical to SEQ ID NO: 1943
  misc_feature 1..1458: note = Synthetic
  source 1..1458: mol_type = other DNA

SEQ ID NO: 4533 - DNA, 1458 bp, synthetic construct; identical to SEQ ID NO: 1944
  misc_feature 1..1458: note = Synthetic
  source 1..1458: mol_type = other DNA

SEQ ID NO: 4534 - DNA, 1455 bp, synthetic construct; identical to SEQ ID NO: 1945
  misc_feature 1..1455: note = Synthetic
  source 1..1455: mol_type = other DNA

SEQ ID NO: 4535 - DNA, 1458 bp, synthetic construct; identical to SEQ ID NO: 1946
  misc_feature 1..1458: note = Synthetic
  source 1..1458: mol_type = other DNA

SEQ ID NO: 4536 - DNA, 1438 bp, synthetic construct; identical to SEQ ID NO: 1947
  misc_feature 1..1438: note = Synthetic
  source 1..1438: mol_type = other DNA

SEQ ID NO: 4537 - DNA, 1452 bp, synthetic construct; identical to SEQ ID NO: 1948
  misc_feature 1..1452: note = Synthetic
  source 1..1452: mol_type = other DNA

SEQ ID NO: 4538 - DNA, 1458 bp, synthetic construct; identical to SEQ ID NO: 1949
  misc_feature 1..1458: note = Synthetic
  source 1..1458: mol_type = other DNA

SEQ ID NO: 4539 - DNA, 1458 bp, synthetic construct; identical to SEQ ID NO: 1950
  misc_feature 1..1458: note = Synthetic
  source 1..1458: mol_type = other DNA

SEQ ID NO: 4540 - DNA, 1461 bp, synthetic construct; identical to SEQ ID NO: 1951
  misc_feature 1..1461: note = Synthetic
  source 1..1461: mol_type = other DNA

SEQ ID NO: 4541 - DNA, 1455 bp, synthetic construct; identical to SEQ ID NO: 1952
  misc_feature 1..1455: note = Synthetic
  source 1..1455: mol_type = other DNA

SEQ ID NO: 4542 - DNA, 1458 bp, synthetic construct; identical to SEQ ID NO: 1953
  misc_feature 1..1458: note = Synthetic
  source 1..1458: mol_type = other DNA

SEQ ID NO: 4543 - DNA, 1458 bp, synthetic construct; identical to SEQ ID NO: 1954
  misc_feature 1..1458: note = Synthetic
  source 1..1458: mol_type = other DNA

SEQ ID NO: 4544 - DNA, 1473 bp, synthetic construct; identical to SEQ ID NO: 1955
  misc_feature 1..1473: note = Synthetic
  source 1..1473: mol_type = other DNA

SEQ ID NO: 4545 - DNA, 1470 bp, synthetic construct; identical to SEQ ID NO: 1956
  misc_feature 1..1470: note = Synthetic
  source 1..1470: mol_type = other DNA

SEQ ID NO: 4546 - DNA, 1464 bp, synthetic construct; identical to SEQ ID NO: 1957
  misc_feature 1..1464: note = Synthetic
  source 1..1464: mol_type = other DNA

SEQ ID NO: 4547 - DNA, 1464 bp, synthetic construct; identical to SEQ ID NO: 1958
  misc_feature 1..1464: note = Synthetic
  source 1..1464: mol_type = other DNA

SEQ ID NO: 4548 - DNA, 1458 bp, synthetic construct; identical to SEQ ID NO: 1959
  misc_feature 1..1458: note = Synthetic
  source 1..1458: mol_type = other DNA

SEQ ID NO: 4549 - DNA, 1458 bp, synthetic construct; identical to SEQ ID NO: 1960
  misc_feature 1..1458: note = Synthetic
  source 1..1458: mol_type = other DNA

SEQ ID NO: 4550 - DNA, 1461 bp, synthetic construct; identical to SEQ ID NO: 1961
  misc_feature 1..1461: note = Synthetic
  source 1..1461: mol_type = other DNA

SEQ ID NO: 4551 - DNA, 1458 bp, synthetic construct; identical to SEQ ID NO: 1962
  misc_feature 1..1458: note = Synthetic
  source 1..1458: mol_type = other DNA

SEQ ID NO: 4552 - DNA, 1458 bp, synthetic construct; identical to SEQ ID NO: 1963
  misc_feature 1..1458: note = Synthetic
  source 1..1458: mol_type = other DNA

SEQ ID NO: 4553 - DNA, 1455 bp, synthetic construct; identical to SEQ ID NO: 1964
  misc_feature 1..1455: note = Synthetic
  source 1..1455: mol_type = other DNA

SEQ ID NO: 4554 - DNA, 1458 bp, synthetic construct; identical to SEQ ID NO: 1965
  misc_feature 1..1458: note = Synthetic
  source 1..1458: mol_type = other DNA

SEQ ID NO: 4555 - DNA, 1446 bp, synthetic construct; identical to SEQ ID NO: 1966
  misc_feature 1..1446: note = Synthetic
  source 1..1446: mol_type = other DNA

SEQ ID NO: 4556 - DNA, 1452 bp, synthetic construct; identical to SEQ ID NO: 1967
  misc_feature 1..1452: note = Synthetic
  source 1..1452: mol_type = other DNA

SEQ ID NO: 4557 - DNA, 1458 bp, synthetic construct; identical to SEQ ID NO: 1968
  misc_feature 1..1458: note = Synthetic
  source 1..1458: mol_type = other DNA

SEQ ID NO: 4558 - DNA, 1458 bp, synthetic construct; identical to SEQ ID NO: 1969
  misc_feature 1..1458: note = Synthetic
  source 1..1458: mol_type = other DNA

SEQ ID NO: 4559 - DNA, 1461 bp, synthetic construct; identical to SEQ ID NO: 1970
  misc_feature 1..1461: note = Synthetic
  source 1..1461: mol_type = other DNA

SEQ ID NO: 4560 - DNA, 1455 bp, synthetic construct; identical to SEQ ID NO: 1971
  misc_feature 1..1455: note = Synthetic
  source 1..1455: mol_type = other DNA

SEQ ID NO: 4561 - DNA, 1458 bp, synthetic construct; identical to SEQ ID NO: 1972
  misc_feature 1..1458: note = Synthetic
  source 1..1458: mol_type = other DNA

SEQ ID NO: 4562 - DNA, 1458 bp, synthetic construct; identical to SEQ ID NO: 1973
  misc_feature 1..1458: note = Synthetic
  source 1..1458: mol_type = other DNA

SEQ ID NO: 4563 - DNA, 1473 bp, synthetic construct; identical to SEQ ID NO: 1974
  misc_feature 1..1473: note = Synthetic
  source 1..1473: mol_type = other DNA

SEQ ID NO: 4564 - DNA, 1470 bp, synthetic construct; identical to SEQ ID NO: 1975
  misc_feature 1..1470: note = Synthetic
  source 1..1470: mol_type = other DNA

SEQ ID NO: 4565 - DNA, 1464 bp, synthetic construct; identical to SEQ ID NO: 1976
  misc_feature 1..1464: note = Synthetic
  source 1..1464: mol_type = other DNA

SEQ ID NO: 4566 - DNA, 1464 bp, synthetic construct; identical to SEQ ID NO: 1977
  misc_feature 1..1464: note = Synthetic
  source 1..1464: mol_type = other DNA

SEQ ID NO: 4567 - DNA, 1458 bp, synthetic construct; identical to SEQ ID NO: 1978
  misc_feature 1..1458: note = Synthetic
  source 1..1458: mol_type = other DNA

SEQ ID NO: 4568 - DNA, 1458 bp, synthetic construct; identical to SEQ ID NO: 1979
  misc_feature 1..1458: note = Synthetic
  source 1..1458: mol_type = other DNA

SEQ ID NO: 4569 - DNA, 1461 bp, synthetic construct; identical to SEQ ID NO: 1980
  misc_feature 1..1461: note = Synthetic
  source 1..1461: mol_type = other DNA

SEQ ID NO: 4570 - protein, 711 aa, synthetic construct; identical to SEQ ID NO: 1981
  REGION 1..711: note = Synthetic

SEQ ID NO: 4571 - protein, 711 aa, synthetic construct; identical to SEQ ID NO: 1982
  REGION 1..711: note = Synthetic

SEQ ID NO: 4572 - protein, 710 aa, synthetic construct; identical to SEQ ID NO: 1983
  REGION 1..710: note = Synthetic

SEQ ID NO: 4573 - protein, 711 aa, synthetic construct; identical to SEQ ID NO: 1984
  REGION 1..711: note = Synthetic

SEQ ID NO: 4574 - protein, 704 aa, synthetic construct; identical to SEQ ID NO: 1985
  REGION 1..704: note = Synthetic

SEQ ID NO: 4575 - protein, 709 aa, synthetic construct; identical to SEQ ID NO: 1986
  REGION 1..709: note = Synthetic

SEQ ID NO: 4576 - protein, 711 aa, synthetic construct; identical to SEQ ID NO: 1987
  REGION 1..711: note = Synthetic

SEQ ID NO: 4577 - protein, 711 aa, synthetic construct; identical to SEQ ID NO: 1988
  REGION 1..711: note = Synthetic

SEQ ID NO: 4578 - protein, 712 aa, synthetic construct; identical to SEQ ID NO: 1989
  REGION 1..712: note = Synthetic

SEQ ID NO: 4579 - protein, 710 aa, synthetic construct; identical to SEQ ID NO: 1990
  REGION 1..710: note = Synthetic

SEQ ID NO: 4580 - protein, 711 aa, synthetic construct; identical to SEQ ID NO: 1991
  REGION 1..711: note = Synthetic

SEQ ID NO: 4581 - protein, 711 aa, synthetic construct; identical to SEQ ID NO: 1992
  REGION 1..711: note = Synthetic

SEQ ID NO: 4582 - protein, 716 aa, synthetic construct; identical to SEQ ID NO: 1993
  REGION 1..716: note = Synthetic

SEQ ID NO: 4583 - protein, 715 aa, synthetic construct; identical to SEQ ID NO: 1994
  REGION 1..715: note = Synthetic

SEQ ID NO: 4584 - protein, 713 aa, synthetic construct; identical to SEQ ID NO: 1995
  REGION 1..713: note = Synthetic

SEQ ID NO: 4585 - protein, 713 aa, synthetic construct; identical to SEQ ID NO: 1996
  REGION 1..713: note = Synthetic

SEQ ID NO: 4586 - protein, 711 aa, synthetic construct; identical to SEQ ID NO: 1997
  REGION 1..711: note = Synthetic

SEQ ID NO: 4587 - protein, 711 aa, synthetic construct; identical to SEQ ID NO: 1998
  REGION 1..711: note = Synthetic

SEQ ID NO: 4588 - protein, 712 aa, synthetic construct; identical to SEQ ID NO: 1999
  REGION 1..712: note = Synthetic

SEQ ID NO: 4589 - DNA, 2136 bp, synthetic construct; identical to SEQ ID NO: 2000
  misc_feature 1..2136: note = Synthetic
  source 1..2136: mol_type = other DNA

SEQ ID NO: 4590 - DNA, 2136 bp, synthetic construct; identical to SEQ ID NO: 2001
  misc_feature 1..2136: note = Synthetic
  source 1..2136: mol_type = other DNA

SEQ ID NO: 4591 - DNA, 2133 bp, synthetic construct; identical to SEQ ID NO: 2002
  misc_feature 1..2133: note = Synthetic
  source 1..2133: mol_type = other DNA

SEQ ID NO: 4592 - DNA, 2136 bp, synthetic construct; identical to SEQ ID NO: 2003
  misc_feature 1..2136: note = Synthetic
  source 1..2136: mol_type = other DNA

SEQ ID NO: 4593 - DNA, 2116 bp, synthetic construct; identical to SEQ ID NO: 2004
  misc_feature 1..2116: note = Synthetic
  source 1..2116: mol_type = other DNA

SEQ ID NO: 4594 - DNA, 2130 bp, synthetic construct; identical to SEQ ID NO: 2005
  misc_feature 1..2130: note = Synthetic
  source 1..2130: mol_type = other DNA

SEQ ID NO: 4595 - DNA, 2136 bp, synthetic construct; identical to SEQ ID NO: 2006
  misc_feature 1..2136: note = Synthetic
  source 1..2136: mol_type = other DNA

SEQ ID NO: 4596 - DNA, 2136 bp, synthetic construct; identical to SEQ ID NO: 2007
  misc_feature 1..2136: note = Synthetic
  source 1..2136: mol_type = other DNA

SEQ ID NO: 4597 - DNA, 2139 bp, synthetic construct; identical to SEQ ID NO: 2008
  misc_feature 1..2139: note = Synthetic
  source 1..2139: mol_type = other DNA

SEQ ID NO: 4598 - DNA, 2133 bp, synthetic construct; identical to SEQ ID NO: 2009
  misc_feature 1..2133: note = Synthetic
  source 1..2133: mol_type = other DNA

SEQ ID NO: 4599 - DNA, 2136 bp, synthetic construct; identical to SEQ ID NO: 2010
  misc_feature 1..2136: note = Synthetic
  source 1..2136: mol_type = other DNA

SEQ ID NO: 4600 - DNA, 2136 bp, synthetic construct; identical to SEQ ID NO: 2011
  misc_feature 1..2136: note = Synthetic
  source 1..2136: mol_type = other DNA

SEQ ID NO: 4601 - DNA, 2151 bp, synthetic construct; identical to SEQ ID NO: 2012
  misc_feature 1..2151: note = Synthetic
  source 1..2151: mol_type = other DNA

SEQ ID NO: 4602 - DNA, 2148 bp, synthetic construct; identical to SEQ ID NO: 2013
  misc_feature 1..2148: note = Synthetic
  source 1..2148: mol_type = other DNA

SEQ ID NO: 4603 - DNA, 2142 bp, synthetic construct; identical to SEQ ID NO: 2014
  misc_feature 1..2142: note = Synthetic
  source 1..2142: mol_type = other DNA

SEQ ID NO: 4604 - DNA, 2142 bp, synthetic construct; identical to SEQ ID NO: 2015
  misc_feature 1..2142: note = Synthetic
  source 1..2142: mol_type = other DNA

SEQ ID NO: 4605 - DNA, 2136 bp, synthetic construct; identical to SEQ ID NO: 2016
  misc_feature 1..2136: note = Synthetic
  source 1..2136: mol_type = other DNA

SEQ ID NO: 4606 - DNA, 2136 bp, synthetic construct; identical to SEQ ID NO: 2017
  misc_feature 1..2136: note = Synthetic
  source 1..2136: mol_type = other DNA

SEQ ID NO: 4607 - DNA, 2139 bp, synthetic construct; identical to SEQ ID NO: 2018
  misc_feature 1..2139: note = Synthetic
  source 1..2139: mol_type = other DNA

SEQ ID NO: 4608 - DNA, 2136 bp, synthetic construct; identical to SEQ ID NO: 2019
  misc_feature 1..2136: note = Synthetic
  source 1..2136: mol_type = other DNA

SEQ ID NO: 4609 - DNA, 2136 bp, synthetic construct; identical to SEQ ID NO: 2020
  misc_feature 1..2136: note = Synthetic
  source 1..2136: mol_type = other DNA

SEQ ID NO: 4610 - DNA, 2133 bp, synthetic construct; identical to SEQ ID NO: 2021
  misc_feature 1..2133: note = Synthetic
  source 1..2133: mol_type = other DNA

SEQ ID NO: 4611 - DNA, 2136 bp, synthetic construct; identical to SEQ ID NO: 2022
  misc_feature 1..2136: note = Synthetic
  source 1..2136: mol_type = other DNA

SEQ ID NO: 4612 - DNA, 2124 bp, synthetic construct; identical to SEQ ID NO: 2023
  misc_feature 1..2124: note = Synthetic
  source 1..2124: mol_type = other DNA

SEQ ID NO: 4613 - DNA, 2130 bp, synthetic construct; identical to SEQ ID NO: 2024
  misc_feature 1..2130: note = Synthetic
  source 1..2130: mol_type = other DNA

SEQ ID NO: 4614 - DNA, 2136 bp, synthetic construct; identical to SEQ ID NO: 2025
  misc_feature 1..2136: note = Synthetic
  source 1..2136: mol_type = other DNA

SEQ ID NO: 4615 - DNA, 2136 bp, synthetic construct; identical to SEQ ID NO: 2026
  misc_feature 1..2136: note = Synthetic
  source 1..2136: mol_type = other DNA

SEQ ID NO: 4616 - DNA, 2139 bp, synthetic construct; identical to SEQ ID NO: 2027
  misc_feature 1..2139: note = Synthetic
  source 1..2139: mol_type = other DNA

SEQ ID NO: 4617 - DNA, 2133 bp, synthetic construct; identical to SEQ ID NO: 2028
  misc_feature 1..2133: note = Synthetic
  source 1..2133: mol_type = other DNA

SEQ ID NO: 4618 - DNA, 2136 bp, synthetic construct; identical to SEQ ID NO: 2029
  misc_feature 1..2136: note = Synthetic
  source 1..2136: mol_type = other DNA

SEQ ID NO: 4619 - DNA, 2136 bp, synthetic construct; identical to SEQ ID NO: 2030
  misc_feature 1..2136: note = Synthetic
  source 1..2136: mol_type = other DNA

SEQ ID NO: 4620 - DNA, 2151 bp, synthetic construct; identical to SEQ ID NO: 2031
  misc_feature 1..2151: note = Synthetic
  source 1..2151: mol_type = other DNA

SEQ ID NO: 4621 - DNA, 2148 bp, synthetic construct; identical to SEQ ID NO: 2032
  misc_feature 1..2148: note = Synthetic
  source 1..2148: mol_type = other DNA

SEQ ID NO: 4622 - DNA, 2142 bp, synthetic construct; identical to SEQ ID NO: 2033
  misc_feature 1..2142: note = Synthetic
  source 1..2142: mol_type = other DNA

SEQ ID NO: 4623 - DNA, 2142 bp, synthetic construct; identical to SEQ ID NO: 2034
  misc_feature 1..2142: note = Synthetic
  source 1..2142: mol_type = other DNA

SEQ ID NO: 4624 - DNA, 2136 bp, synthetic construct; identical to SEQ ID NO: 2035
  misc_feature 1..2136: note = Synthetic
  source 1..2136: mol_type = other DNA

SEQ ID NO: 4625 - DNA, 2136 bp, synthetic construct; identical to SEQ ID NO: 2036
  misc_feature 1..2136: note = Synthetic
  source 1..2136: mol_type = other DNA

SEQ ID NO: 4626 - DNA, 2139 bp, synthetic construct; identical to SEQ ID NO: 2037
  misc_feature 1..2139: note = Synthetic
  source 1..2139: mol_type = other DNA

SEQ ID NO: 4627 - protein, 492 aa, synthetic construct; identical to SEQ ID NO: 2038
  REGION 1..492: note = Synthetic

SEQ ID NO: 4628 - protein, 492 aa, synthetic construct; identical to SEQ ID NO: 2039
  REGION 1..492: note = Synthetic

SEQ ID NO: 4629 - protein, 491 aa, synthetic construct; identical to SEQ ID NO: 2040
  REGION 1..491: note = Synthetic

SEQ ID NO: 4630 - protein, 492 aa, synthetic construct; identical to SEQ ID NO: 2041
  REGION 1..492: note = Synthetic

SEQ ID NO: 4631 - protein, 485 aa, synthetic construct; identical to SEQ ID NO: 2042
  REGION 1..485: note = Synthetic

SEQ ID NO: 4632 - protein, 490 aa, synthetic construct; identical to SEQ ID NO: 2043
  REGION 1..490: note = Synthetic

SEQ ID NO: 4633 - protein, 492 aa, synthetic construct; identical to SEQ ID NO: 2044
  REGION 1..492: note = Synthetic

SEQ ID NO: 4634 - protein, 492 aa, synthetic construct; identical to SEQ ID NO: 2045
  REGION 1..492: note = Synthetic

SEQ ID NO: 4635 - protein, 493 aa, synthetic construct; identical to SEQ ID NO: 2046
  REGION 1..493: note = Synthetic

SEQ ID NO: 4636 - protein, 491 aa, synthetic construct; identical to SEQ ID NO: 2047
  REGION 1..491: note = Synthetic

SEQ ID NO: 4637 - protein, 492 aa, synthetic construct; identical to SEQ ID NO: 2048
  REGION 1..492: note = Synthetic

SEQ ID NO: 4638 - protein, 492 aa, synthetic construct; identical to SEQ ID NO: 2049
  REGION 1..492: note = Synthetic

SEQ ID NO: 4639 - protein, 497 aa, synthetic construct; identical to SEQ ID NO: 2050
  REGION 1..497: note = Synthetic

SEQ ID NO: 4640 - protein, 496 aa, synthetic construct; identical to SEQ ID NO: 2051
  REGION 1..496: note = Synthetic

SEQ ID NO: 4641 - protein, 494 aa, synthetic construct; identical to SEQ ID NO: 2052
  REGION 1..494: note = Synthetic

SEQ ID NO: 4642 - protein, 494 aa, synthetic construct; identical to SEQ ID NO: 2053
  REGION 1..494: note = Synthetic

SEQ ID NO: 4643 - protein, 492 aa, synthetic construct; identical to SEQ ID NO: 2054
  REGION 1..492: note = Synthetic

SEQ ID NO: 4644 - protein, 492 aa, synthetic construct; identical to SEQ ID NO: 2055
  REGION 1..492: note = Synthetic

SEQ ID NO: 4645 - protein, 493 aa, synthetic construct; identical to SEQ ID NO: 2056
  REGION 1..493: note = Synthetic

SEQ ID NO: 4646 - DNA, 1476 bp, synthetic construct; identical to SEQ ID NO: 2057
  misc_feature 1..1476: note = Synthetic
  source 1..1476: mol_type = other DNA

SEQ ID NO: 4647 - DNA, 1476 bp, synthetic construct; identical to SEQ ID NO: 2058
  misc_feature 1..1476: note = Synthetic
  source 1..1476: mol_type = other DNA

SEQ ID NO: 4648 - DNA, 1473 bp, synthetic construct; identical to SEQ ID NO: 2059
  misc_feature 1..1473: note = Synthetic
  source 1..1473: mol_type = other DNA

SEQ ID NO: 4649 - DNA, 1476 bp, synthetic construct; identical to SEQ ID NO: 2060
  misc_feature 1..1476: note = Synthetic
  source 1..1476: mol_type = other DNA

SEQ ID NO: 4650 - DNA, 1456 bp, synthetic construct; identical to SEQ ID NO: 2061
  misc_feature 1..1456: note = Synthetic
  source 1..1456: mol_type = other DNA

SEQ ID NO: 4651 - DNA, 1470 bp, synthetic construct; identical to SEQ ID NO: 2062
  misc_feature 1..1470: note = Synthetic
  source 1..1470: mol_type = other DNA

SEQ ID NO: 4652 - DNA, 1476 bp, synthetic construct; identical to SEQ ID NO: 2063
  misc_feature 1..1476: note = Synthetic
  source 1..1476: mol_type = other DNA

SEQ ID NO: 4653 - DNA, 1476 bp, synthetic construct; identical to SEQ ID NO: 2064
  misc_feature 1..1476: note = Synthetic
  source 1..1476: mol_type = other DNA

SEQ ID NO: 4654 - DNA, 1479 bp, synthetic construct; identical to SEQ ID NO: 2065
  misc_feature 1..1479: note = Synthetic
  source 1..1479: mol_type = other DNA

SEQ ID NO: 4655 - DNA, 1473 bp, synthetic construct; identical to SEQ ID NO: 2066
  misc_feature 1..1473: note = Synthetic
  source 1..1473: mol_type = other DNA

SEQ ID NO: 4656 - DNA, 1476 bp, synthetic construct; identical to SEQ ID NO: 2067
  misc_feature 1..1476: note = Synthetic
  source 1..1476: mol_type = other DNA

SEQ ID NO: 4657 - DNA, 1476 bp, synthetic construct; identical to SEQ ID NO: 2068
  misc_feature 1..1476: note = Synthetic
  source 1..1476: mol_type = other DNA

SEQ ID NO: 4658 - DNA, 1491 bp, synthetic construct; identical to SEQ ID NO: 2069
  misc_feature 1..1491: note = Synthetic
  source 1..1491: mol_type = other DNA

SEQ ID NO: 4659 - DNA, 1488 bp, synthetic construct; identical to SEQ ID NO: 2070
  misc_feature 1..1488: note = Synthetic
  source 1..1488: mol_type = other DNA

SEQ ID NO: 4660 - DNA, 1482 bp, synthetic construct; identical to SEQ ID NO: 2071
  misc_feature 1..1482: note = Synthetic
  source 1..1482: mol_type = other DNA

SEQ ID NO: 4661 - DNA, 1482 bp, synthetic construct; identical to SEQ ID NO: 2072
  misc_feature 1..1482: note = Synthetic
  source 1..1482: mol_type = other DNA

SEQ ID NO: 4662 - DNA, 1476 bp, synthetic construct; identical to SEQ ID NO: 2073
  misc_feature 1..1476: note = Synthetic
  source 1..1476: mol_type = other DNA

SEQ ID NO: 4663 - DNA, 1476 bp, synthetic construct; identical to SEQ ID NO: 2074
  misc_feature 1..1476: note = Synthetic
  source 1..1476: mol_type = other DNA

SEQ ID NO: 4664 - DNA, 1479 bp, synthetic construct; identical to SEQ ID NO: 2075
  misc_feature 1..1479: note = Synthetic
  source 1..1479: mol_type = other DNA

SEQ ID NO: 4665 - DNA, 1476 bp, synthetic construct; identical to SEQ ID NO: 2076
  misc_feature 1..1476: note = Synthetic
  source 1..1476: mol_type = other DNA

SEQ ID NO: 4666 - DNA, 1476 bp, synthetic construct; identical to SEQ ID NO: 2077
  misc_feature 1..1476: note = Synthetic
  source 1..1476: mol_type = other DNA

SEQ ID NO: 4667 - DNA, 1473 bp, synthetic construct; identical to SEQ ID NO: 2078
  misc_feature 1..1473: note = Synthetic
  source 1..1473: mol_type = other DNA

SEQ ID NO: 4668 - DNA, 1470 bp, synthetic construct; identical to SEQ ID NO: 2079
  misc_feature 1..1470: note = Synthetic
  source 1..1470: mol_type = other DNA

SEQ ID NO: 4669 - DNA, 1464 bp, synthetic construct; identical to SEQ ID NO: 2080
  misc_feature 1..1464: note = Synthetic
  source 1..1464: mol_type = other DNA

SEQ ID NO: 4670 - DNA, 1470 bp, synthetic construct; identical to SEQ ID NO: 2081
  misc_feature 1..1470: note = Synthetic
  source 1..1470: mol_type = other DNA

SEQ ID NO: 4671 - DNA, 1476 bp, synthetic construct; identical to SEQ ID NO: 2082
  misc_feature 1..1476: note = Synthetic
  source 1..1476: mol_type = other DNA

SEQ ID NO: 4672 - DNA, 1476 bp, synthetic construct; identical to SEQ ID NO: 2083
  misc_feature 1..1476: note = Synthetic
  source 1..1476: mol_type = other DNA

SEQ ID NO: 4673 - DNA, 1479 bp, synthetic construct; identical to SEQ ID NO: 2084
  misc_feature 1..1479: note = Synthetic
  source 1..1479: mol_type = other DNA

SEQ ID NO: 4674 - DNA, 1473 bp, synthetic construct; identical to SEQ ID NO: 2085
  misc_feature 1..1473: note = Synthetic
  source 1..1473: mol_type = other DNA

SEQ ID NO: 4675 - DNA, 1476 bp, synthetic construct; identical to SEQ ID NO: 2086
  misc_feature 1..1476: note = Synthetic
  source 1..1476: mol_type = other DNA

SEQ ID NO: 4676 - DNA, 1476 bp, synthetic construct; identical to SEQ ID NO: 2087
  misc_feature 1..1476: note = Synthetic
  source 1..1476: mol_type = other DNA

SEQ ID NO: 4677 - DNA, 1491 bp, synthetic construct; identical to SEQ ID NO: 2088
  misc_feature 1..1491: note = Synthetic
  source 1..1491: mol_type = other DNA

SEQ ID NO: 4678 - DNA, 1488 bp, synthetic construct; identical to SEQ ID NO: 2089
  misc_feature 1..1488: note = Synthetic
  source 1..1488: mol_type = other DNA

SEQ ID NO: 4679 - DNA, 1482 bp, synthetic construct; identical to SEQ ID NO: 2090
  misc_feature 1..1482: note = Synthetic
  source 1..1482: mol_type = other DNA

SEQ ID NO: 4680 - DNA, 1482 bp, synthetic construct; identical to SEQ ID NO: 2091
  misc_feature 1..1482: note = Synthetic
  source 1..1482: mol_type = other DNA

SEQ ID NO: 4681 - DNA, 1476 bp, synthetic construct; identical to SEQ ID NO: 2092
  misc_feature 1..1476: note = Synthetic
  source 1..1476: mol_type = other DNA

SEQ ID NO: 4682 - DNA, 1476 bp, synthetic construct; identical to SEQ ID NO: 2093
  misc_feature 1..1476: note = Synthetic
  source 1..1476: mol_type = other DNA

SEQ ID NO: 4683 - DNA, 1479 bp, synthetic construct; identical to SEQ ID NO: 2094
  misc_feature 1..1479: note = Synthetic
  source 1..1479: mol_type = other DNA

SEQ ID NO: 4684 - protein, 717 aa, synthetic construct; identical to SEQ ID NO: 2095
  REGION 1..717: note = Synthetic

SEQ ID NO: 4685 - protein, 717 aa, synthetic construct; identical to SEQ ID NO: 2096
  REGION 1..717: note = Synthetic

SEQ ID NO: 4686 - protein, 716 aa, synthetic construct; identical to SEQ ID NO: 2097
  REGION 1..716: note = Synthetic

SEQ ID NO: 4687 - protein, 717 aa, synthetic construct; identical to SEQ ID NO: 2098
  REGION 1..717: note = Synthetic

SEQ ID NO: 4688 - protein, 710 aa, synthetic construct; identical to SEQ ID NO: 2099
  REGION 1..710: note = Synthetic

SEQ ID NO: 4689 - protein, 715 aa, synthetic construct; identical to SEQ ID NO: 2100
  REGION 1..715: note = Synthetic

SEQ ID NO: 4690 - protein, 717 aa, synthetic construct; identical to SEQ ID NO: 2101
  REGION 1..717: note = Synthetic

SEQ ID NO: 4691 - protein, 717 aa, synthetic construct; identical to SEQ ID NO: 2102
  REGION 1..717: note = Synthetic

SEQ ID NO: 4692 - protein, 718 aa, synthetic construct; identical to SEQ ID NO: 2103
  REGION 1..718: note = Synthetic

SEQ ID NO: 4693 - protein, 716 aa, synthetic construct; identical to SEQ ID NO: 2104
  REGION 1..716: note = Synthetic

SEQ ID NO: 4694 - protein, 717 aa, synthetic construct; identical to SEQ ID NO: 2105
  REGION 1..717: note = Synthetic

SEQ ID NO: 4695 - protein, 717 aa, synthetic construct; identical to SEQ ID NO: 2106
  REGION 1..717: note = Synthetic

SEQ ID NO: 4696 - protein, 722 aa, synthetic construct; identical to SEQ ID NO: 2107
  REGION 1..722: note = Synthetic

SEQ ID NO: 4697 - protein, 721 aa, synthetic construct; identical to SEQ ID NO: 2108
  REGION 1..721: note = Synthetic

SEQ ID NO: 4698 - protein, 719 aa, synthetic construct; identical to SEQ ID NO: 2109
  REGION 1..719: note = Synthetic

SEQ ID NO: 4699 - protein, 719 aa, synthetic construct; identical to SEQ ID NO: 2110
  REGION 1..719: note = Synthetic

SEQ ID NO: 4700 - protein, 717 aa, synthetic construct; identical to SEQ ID NO: 2111
  REGION 1..717: note = Synthetic

SEQ ID NO: 4701 - protein, 717 aa, synthetic construct; identical to SEQ ID NO: 2112
  REGION 1..717: note = Synthetic

SEQ ID NO: 4702 - protein, 718 aa, synthetic construct; identical to SEQ ID NO: 2113
  REGION 1..718: note = Synthetic

SEQ ID NO: 4703 - DNA, 2154 bp, synthetic construct; identical to SEQ ID NO: 2114
  misc_feature 1..2154: note = Synthetic
  source 1..2154: mol_type = other DNA

SEQ ID NO: 4704 - DNA, 2154 bp, synthetic construct; identical to SEQ ID NO: 2115
  misc_feature 1..2154: note = Synthetic
  source 1..2154: mol_type = other DNA

SEQ ID NO: 4705 - DNA, 2151 bp, synthetic construct; identical to SEQ ID NO: 2116
  misc_feature 1..2151: note = Synthetic
  source 1..2151: mol_type = other DNA

SEQ ID NO: 4706 - DNA, 2154 bp, synthetic construct; identical to SEQ ID NO: 2117
  misc_feature 1..2154: note = Synthetic
  source 1..2154: mol_type = other DNA

SEQ ID NO: 4707 - DNA, 2134 bp, synthetic construct; identical to SEQ ID NO: 2118
  misc_feature 1..2134: note = Synthetic
  source 1..2134: mol_type = other DNA

SEQ ID NO: 4708 - DNA, 2148 bp, synthetic construct; identical to SEQ ID NO: 2119
  misc_feature 1..2148: note = Synthetic
  source 1..2148: mol_type = other DNA

SEQ ID NO: 4709 - DNA, 2154 bp, synthetic construct; identical to SEQ ID NO: 2120
  misc_feature 1..2154: note = Synthetic
  source 1..2154: mol_type = other DNA

SEQ ID NO: 4710 - DNA, 2154 bp, synthetic construct; identical to SEQ ID NO: 2121
  misc_feature 1..2154: note = Synthetic
  source 1..2154: mol_type = other DNA

SEQ ID NO: 4711 - DNA, 2157 bp, synthetic construct; identical to SEQ ID NO: 2122
  misc_feature 1..2157: note = Synthetic
  source 1..2157: mol_type = other DNA

SEQ ID NO: 4712 - DNA, 2151 bp, synthetic construct; identical to SEQ ID NO: 2123
  misc_feature 1..2151: note = Synthetic
  source 1..2151: mol_type = other DNA

SEQ ID NO: 4713 - DNA, 2154 bp, synthetic construct; identical to SEQ ID NO: 2124
  misc_feature 1..2154: note = Synthetic
  source 1..2154: mol_type = other DNA

SEQ ID NO: 4714 - DNA, 2154 bp, synthetic construct; identical to SEQ ID NO: 2125
  misc_feature 1..2154: note = Synthetic
  source 1..2154: mol_type = other DNA

SEQ ID NO: 4715 - DNA, 2169 bp, synthetic construct; identical to SEQ ID NO: 2126
  misc_feature 1..2169: note = Synthetic
  source 1..2169: mol_type = other DNA

SEQ ID NO: 4716 - DNA, 2166 bp, synthetic construct; identical to SEQ ID NO: 2127
  misc_feature 1..2166: note = Synthetic
  source 1..2166: mol_type = other DNA

SEQ ID NO: 4717 - DNA, 2160 bp, synthetic construct; identical to SEQ ID NO: 2128
  misc_feature 1..2160: note = Synthetic
  source 1..2160: mol_type = other DNA

SEQ ID NO: 4718 - DNA, 2160 bp, synthetic construct; identical to SEQ ID NO: 2129
  misc_feature 1..2160: note = Synthetic
  source 1..2160: mol_type = other DNA

SEQ ID NO: 4719 - DNA, 2154 bp, synthetic construct; identical to SEQ ID NO: 2130
  misc_feature 1..2154: note = Synthetic
  source 1..2154: mol_type = other DNA

SEQ ID NO: 4720 - DNA, 2154 bp, synthetic construct; identical to SEQ ID NO: 2131
  misc_feature 1..2154: note = Synthetic
  source 1..2154: mol_type = other DNA

SEQ ID NO: 4721 - DNA, 2157 bp, synthetic construct; identical to SEQ ID NO: 2132
  misc_feature 1..2157: note = Synthetic
  source 1..2157: mol_type = other DNA

SEQ ID NO: 4722 - DNA, 2154 bp, synthetic construct; identical to SEQ ID NO: 2133
  misc_feature 1..2154: note = Synthetic
  source 1..2154: mol_type = other DNA

SEQ ID NO: 4723 - DNA, 2154 bp, synthetic construct; identical to SEQ ID NO: 2134
  misc_feature 1..2154: note = Synthetic
  source 1..2154: mol_type = other DNA

SEQ ID NO: 4724 - DNA, 2151 bp, synthetic construct; identical to SEQ ID NO: 2135
  misc_feature 1..2151: note = Synthetic
  source 1..2151: mol_type = other DNA

SEQ ID NO: 4725 - DNA, 2148 bp, synthetic construct; identical to SEQ ID NO: 2136
  misc_feature 1..2148: note = Synthetic
  source 1..2148: mol_type = other DNA

SEQ ID NO: 4726 - DNA, 2142 bp, synthetic construct; identical to SEQ ID NO: 2137
  misc_feature 1..2142: note = Synthetic
  source 1..2142: mol_type = other DNA

SEQ ID NO: 4727 - DNA, 2148 bp, synthetic construct; identical to SEQ ID NO: 2138
  misc_feature 1..2148: note = Synthetic
  source 1..2148: mol_type = other DNA

SEQ ID NO: 4728 - DNA, 2154 bp, synthetic construct; identical to SEQ ID NO: 2139
  misc_feature 1..2154: note = Synthetic
  source 1..2154: mol_type = other DNA

SEQ ID NO: 4729 - DNA, 2154 bp, synthetic construct; identical to SEQ ID NO: 2140
  misc_feature 1..2154: note = Synthetic
  source 1..2154: mol_type = other DNA

SEQ ID NO: 4730 - DNA, 2157 bp, synthetic construct; identical to SEQ ID NO: 2141
  misc_feature 1..2157: note = Synthetic
  source 1..2157: mol_type = other DNA

SEQ ID NO: 4731 - DNA, 2151 bp, synthetic construct; identical to SEQ ID NO: 2142
  misc_feature 1..2151: note = Synthetic
  source 1..2151: mol_type = other DNA

SEQ ID NO: 4732 - DNA, 2154 bp, synthetic construct; identical to SEQ ID NO: 2143
  misc_feature 1..2154: note = Synthetic
  source 1..2154: mol_type = other DNA

SEQ ID NO: 4733 - DNA, 2154 bp, synthetic construct; identical to SEQ ID NO: 2144
  misc_feature 1..2154: note = Synthetic
  source 1..2154: mol_type = other DNA

SEQ ID NO: 4734 - DNA, 2169 bp, synthetic construct; identical to SEQ ID NO: 2145
  misc_feature 1..2169: note = Synthetic
  source 1..2169: mol_type = other DNA

SEQ ID NO: 4735 - DNA, 2166 bp, synthetic construct; identical to SEQ ID NO: 2146
  misc_feature 1..2166: note = Synthetic
  source 1..2166: mol_type = other DNA

SEQ ID NO: 4736 - DNA, 2160 bp, synthetic construct; identical to SEQ ID NO: 2147
  misc_feature 1..2160: note = Synthetic
  source 1..2160: mol_type = other DNA

SEQ ID NO: 4737 - DNA, 2160 bp, synthetic construct; identical to SEQ ID NO: 2148
  misc_feature 1..2160: note = Synthetic
  source 1..2160: mol_type = other DNA

SEQ ID NO: 4738 - DNA, 2154 bp, synthetic construct; identical to SEQ ID NO: 2149
  misc_feature 1..2154: note = Synthetic
  source 1..2154: mol_type = other DNA

SEQ ID NO: 4739 - DNA, 2154 bp, synthetic construct; identical to SEQ ID NO: 2150
  misc_feature 1..2154: note = Synthetic
  source 1..2154: mol_type = other DNA

SEQ ID NO: 4740 - DNA, 2157 bp, synthetic construct; identical to SEQ ID NO: 2151
  misc_feature 1..2157: note = Synthetic
  source 1..2157: mol_type = other DNA

SEQ ID NO: 4741 - protein, 492 aa, synthetic construct; identical to SEQ ID NO: 2152
  REGION 1..492: note = Synthetic

SEQ ID NO: 4742 - protein, 492 aa, synthetic construct; identical to SEQ ID NO: 2153
  REGION 1..492: note = Synthetic

SEQ ID NO: 4743 - protein, 491 aa, synthetic construct; identical to SEQ ID NO: 2154
  REGION 1..491: note = Synthetic

SEQ ID NO: 4744 - protein, 492 aa, synthetic construct; identical to SEQ ID NO: 2155
  REGION 1..492: note = Synthetic

SEQ ID NO: 4745 - protein, 485 aa, synthetic construct; identical to SEQ ID NO: 2156
  REGION 1..485: note = Synthetic

SEQ ID NO: 4746 - protein, 490 aa, synthetic construct; identical to SEQ ID NO: 2157
  REGION 1..490: note = Synthetic

SEQ ID NO: 4747 - protein, 492 aa, synthetic construct; identical to SEQ ID NO: 2158
  REGION 1..492: note = Synthetic

SEQ ID NO: 4748 - protein, 492 aa, synthetic construct; identical to SEQ ID NO: 2159
  REGION 1..492: note = Synthetic

SEQ ID NO: 4749 - protein, 493 aa, synthetic construct; identical to SEQ ID NO: 2160
  REGION 1..493: note = Synthetic

SEQ ID NO: 4750 - protein, 491 aa, synthetic construct; identical to SEQ ID NO: 2161
  REGION 1..491: note = Synthetic

SEQ ID NO: 4751 - protein, 492 aa, synthetic construct; identical to SEQ ID NO: 2162
  REGION 1..492: note = Synthetic

SEQ ID NO: 4752 - protein, 492 aa, synthetic construct; identical to SEQ ID NO: 2163
  REGION 1..492: note = Synthetic

SEQ ID NO: 4753 - protein, 497 aa, synthetic construct; identical to SEQ ID NO: 2164
  REGION 1..497: note = Synthetic

SEQ ID NO: 4754 - protein, 496 aa, synthetic construct; identical to SEQ ID NO: 2165
  REGION 1..496: note = Synthetic

SEQ ID NO: 4755 - protein, 494 aa, synthetic construct; identical to SEQ ID NO: 2166
  REGION 1..494: note = Synthetic

SEQ ID NO: 4756 - protein, 494 aa, synthetic construct; identical to SEQ ID NO: 2167
  REGION 1..494: note = Synthetic

SEQ ID NO: 4757 - protein, 492 aa, synthetic construct; identical to SEQ ID NO: 2168
  REGION 1..492: note = Synthetic

SEQ ID NO: 4758 - protein, 492 aa, synthetic construct; identical to SEQ ID NO: 2169
  REGION 1..492: note = Synthetic

SEQ ID NO: 4759 - protein, 493 aa, synthetic construct; identical to SEQ ID NO: 2170
  REGION 1..493: note = Synthetic

SEQ ID NO: 4760 - DNA, 1476 bp, synthetic construct; identical to SEQ ID NO: 2171
  misc_feature 1..1476: note = Synthetic
  source 1..1476: mol_type = other DNA

SEQ ID NO: 4761 - DNA, 1476 bp, synthetic construct; identical to SEQ ID NO: 2172
  misc_feature 1..1476: note = Synthetic
  source 1..1476: mol_type = other DNA

SEQ ID NO: 4762 - DNA, 1473 bp, synthetic construct; identical to SEQ ID NO: 2173
  misc_feature 1..1473: note = Synthetic
  source 1..1473: mol_type = other DNA

SEQ ID NO: 4763 - DNA, 1476 bp, synthetic construct; identical to SEQ ID NO: 2174
  misc_feature 1..1476: note = Synthetic
  source 1..1476: mol_type = other DNA

SEQ ID NO: 4764 - DNA, 1456 bp, synthetic construct; identical to SEQ ID NO: 2175
  misc_feature 1..1456: note = Synthetic
  source 1..1456: mol_type = other DNA

SEQ ID NO: 4765 - DNA, 1470 bp, synthetic construct; identical to SEQ ID NO: 2176
  misc_feature 1..1470: note = Synthetic
  source 1..1470: mol_type = other DNA

SEQ ID NO: 4766 - DNA, 1476 bp, synthetic construct; identical to SEQ ID NO: 2177
  misc_feature 1..1476: note = Synthetic
  source 1..1476: mol_type = other DNA

SEQ ID NO: 4767 - DNA, 1476 bp, synthetic construct; identical to SEQ ID NO: 2178
  misc_feature 1..1476: note = Synthetic
  source 1..1476: mol_type = other DNA

SEQ ID NO: 4768 - DNA, 1479 bp, synthetic construct; identical to SEQ ID NO: 2179
  misc_feature 1..1479: note = Synthetic
  source 1..1479: mol_type = other DNA

SEQ ID NO: 4769 - DNA, 1473 bp, synthetic construct; identical to SEQ ID NO: 2180
  misc_feature 1..1473: note = Synthetic
  source 1..1473: mol_type = other DNA

SEQ ID NO: 4770 - DNA, 1476 bp, synthetic construct; identical to SEQ ID NO: 2181
  misc_feature 1..1476: note = Synthetic
  source 1..1476: mol_type = other DNA

SEQ ID NO: 4771 - DNA, 1476 bp, synthetic construct; identical to SEQ ID NO: 2182
  misc_feature 1..1476: note = Synthetic
  source 1..1476: mol_type = other DNA

SEQ ID NO: 4772 - DNA, 1491 bp, synthetic construct; identical to SEQ ID NO: 2183
  misc_feature 1..1491: note = Synthetic
  source 1..1491: mol_type = other DNA

SEQ ID NO: 4773 - DNA, 1488 bp, synthetic construct; identical to SEQ ID NO: 2184
  misc_feature 1..1488: note = Synthetic
  source 1..1488: mol_type = other DNA

SEQ ID NO: 4774 - DNA, 1482 bp, synthetic construct; identical to SEQ ID NO: 2185
  misc_feature 1..1482: note = Synthetic
  source 1..1482: mol_type = other DNA

SEQ ID NO: 4775 - DNA, 1482 bp, synthetic construct; identical to SEQ ID NO: 2186
  misc_feature 1..1482: note = Synthetic
  source 1..1482: mol_type = other DNA

SEQ ID NO: 4776 - DNA, 1476 bp, synthetic construct; identical to SEQ ID NO: 2187
  misc_feature 1..1476: note = Synthetic
  source 1..1476: mol_type = other DNA

SEQ ID NO: 4777 - DNA, 1476 bp, synthetic construct; identical to SEQ ID NO: 2188
  misc_feature 1..1476: note = Synthetic
  source 1..1476: mol_type = other DNA

SEQ ID NO: 4778 - DNA, 1479 bp, synthetic construct; identical to SEQ ID NO: 2189
  misc_feature 1..1479: note = Synthetic
  source 1..1479: mol_type = other DNA

SEQ ID NO: 4779 - DNA, 1476 bp, synthetic construct; identical to SEQ ID NO: 2190
  misc_feature 1..1476: note = Synthetic
  source 1..1476: mol_type = other DNA

SEQ ID NO: 4780 - DNA, 1476 bp, synthetic construct; identical to SEQ ID NO: 2191
  misc_feature 1..1476: note = Synthetic
  source 1..1476: mol_type = other DNA

SEQ ID NO: 4781 - DNA, 1473 bp, synthetic construct; identical to SEQ ID NO: 2192
  misc_feature 1..1473: note = Synthetic
  source 1..1473: mol_type = other DNA

SEQ ID NO: 4782 - DNA, 1470 bp, synthetic construct; identical to SEQ ID NO: 2193
  misc_feature 1..1470: note = Synthetic
  source 1..1470: mol_type = other DNA

SEQ ID NO: 4783 - DNA, 1464 bp, synthetic construct; identical to SEQ ID NO: 2080
  misc_feature 1..1464: note = Synthetic
  source 1..1464: mol_type = other DNA

SEQ ID NO: 4784 - DNA, 1470 bp, synthetic construct; identical to SEQ ID NO: 2195
  misc_feature 1..1470: note = Synthetic
  source 1..1470: mol_type = other DNA

SEQ ID NO: 4785 - DNA, 1476 bp, synthetic construct; identical to SEQ ID NO: 2196
  misc_feature 1..1476: note = Synthetic
  source 1..1476: mol_type = other DNA

SEQ ID NO: 4786 - DNA, 1476 bp, synthetic construct; identical to SEQ ID NO: 2197
  misc_feature 1..1476: note = Synthetic
  source 1..1476: mol_type = other DNA

SEQ ID NO: 4787 - DNA, 1479 bp, synthetic construct; identical to SEQ ID NO: 2198
  misc_feature 1..1479: note = Synthetic
  source 1..1479: mol_type = other DNA

SEQ ID NO: 4788 - DNA, 1473 bp, synthetic construct; identical to SEQ ID NO: 2199
  misc_feature 1..1473: note = Synthetic
  source 1..1473: mol_type = other DNA

SEQ ID NO: 4789 - DNA, 1476 bp, synthetic construct; identical to SEQ ID NO: 2200
  misc_feature 1..1476: note = Synthetic
  source 1..1476: mol_type = other DNA

SEQ ID NO: 4790 - DNA, 1476 bp, synthetic construct; identical to SEQ ID NO: 2201
  misc_feature 1..1476: note = Synthetic
  source 1..1476: mol_type = other DNA

SEQ ID NO: 4791 - DNA, 1491 bp, synthetic construct; identical to SEQ ID NO: 2202
  misc_feature 1..1491: note = Synthetic
  source 1..1491: mol_type = other DNA

SEQ ID NO: 4792 - DNA, 1488 bp, synthetic construct; identical to SEQ ID NO: 2203
  misc_feature 1..1488: note = Synthetic
  source 1..1488: mol_type = other DNA

SEQ ID NO: 4793 - DNA, 1482 bp, synthetic construct; identical to SEQ ID NO: 2204
  misc_feature 1..1482: note = Synthetic
  source 1..1482: mol_type = other DNA

SEQ ID NO: 4794 - DNA, 1482 bp, synthetic construct; identical to SEQ ID NO: 2205
  misc_feature 1..1482: note = Synthetic
  source 1..1482: mol_type = other DNA

SEQ ID NO: 4795 - DNA, 1476 bp, synthetic construct; identical to SEQ ID NO: 2206
  misc_feature 1..1476: note = Synthetic
  source 1..1476: mol_type = other DNA

SEQ ID NO: 4796 - DNA, 1476 bp, synthetic construct; identical to SEQ ID NO: 2207
  misc_feature 1..1476: note = Synthetic
  source 1..1476: mol_type = other DNA

SEQ ID NO: 4797 - DNA, 1479 bp, synthetic construct; identical to SEQ ID NO: 2208
  misc_feature 1..1479: note = Synthetic
  source 1..1479: mol_type = other DNA

SEQ ID NO: 4798 - protein, 717 aa, synthetic construct; identical to SEQ ID NO: 2209
  REGION 1..717: note = Synthetic

SEQ ID NO: 4799 - protein, 717 aa, synthetic construct; identical to SEQ ID NO: 2210
  REGION 1..717: note = Synthetic

SEQ ID NO: 4800 - protein, 716 aa, synthetic construct; identical to SEQ ID NO: 2211
  REGION 1..716: note = Synthetic

SEQ ID NO: 4801 - protein, 717 aa, synthetic construct; identical to SEQ ID NO: 2212
  REGION 1..717: note = Synthetic

SEQ ID NO: 4802 - protein, 710 aa, synthetic construct; identical to SEQ ID NO: 2213
  REGION 1..710: note = Synthetic

SEQ ID NO: 4803 - protein, 715 aa, synthetic construct; identical to SEQ ID NO: 2214
  REGION 1..715: note = Synthetic

SEQ ID NO: 4804 - protein, 717 aa, synthetic construct; identical to SEQ ID NO: 2215
  REGION 1..717: note = Synthetic

SEQ ID NO: 4805 - protein, 717 aa, synthetic construct; identical to SEQ ID NO: 2216
  REGION 1..717: note = Synthetic

SEQ ID NO: 4806 - protein, 718 aa, synthetic construct; identical to SEQ ID NO: 2217
  REGION 1..718: note = Synthetic

SEQ ID NO: 4807 - protein, 716 aa, synthetic construct; identical to SEQ ID NO: 2218
  REGION 1..716: note = Synthetic

SEQ ID NO: 4808 - protein, 717 aa, synthetic construct; identical to SEQ ID NO: 2219
  REGION 1..717: note = Synthetic

SEQ ID NO: 4809 - protein, 717 aa, synthetic construct; identical to SEQ ID NO: 2220
  REGION 1..717: note = Synthetic

SEQ ID NO: 4810 - protein, 722 aa, synthetic construct; identical to SEQ ID NO: 2221
  REGION 1..722: note = Synthetic

SEQ ID NO: 4811 - protein, 721 aa, synthetic construct; identical to SEQ ID NO: 2222
  REGION 1..721: note = Synthetic

SEQ ID NO: 4812 - protein, 719 aa, synthetic construct; identical to SEQ ID NO: 2223
  REGION 1..719: note = Synthetic

SEQ ID NO: 4813 - protein, 719 aa, synthetic construct; identical to SEQ ID NO: 2224
  REGION 1..719: note = Synthetic

SEQ ID NO: 4814 - protein, 717 aa, synthetic construct; identical to SEQ ID NO: 2225
  REGION 1..717: note = Synthetic

SEQ ID NO: 4815 - protein, 717 aa, synthetic construct; identical to SEQ ID NO: 2226
  REGION 1..717: note = Synthetic

SEQ ID NO: 4816 - protein, 718 aa, synthetic construct; identical to SEQ ID NO: 2227
  REGION 1..718: note = Synthetic

SEQ ID NO: 4817 - DNA, 2154 bp, synthetic construct; identical to SEQ ID NO: 2228
  misc_feature 1..2154: note = Synthetic
  source 1..2154: mol_type = other DNA

SEQ ID NO: 4818 - DNA, 2154 bp, synthetic construct; identical to SEQ ID NO: 2229
  misc_feature 1..2154: note = Synthetic
  source 1..2154: mol_type = other DNA

SEQ ID NO: 4819 - DNA, 2151 bp, synthetic construct; identical to SEQ ID NO: 2230
  misc_feature 1..2151: note = Synthetic
  source 1..2151: mol_type = other DNA

SEQ ID NO: 4820 - DNA, 2154 bp, synthetic construct; identical to SEQ ID NO: 2231
  misc_feature 1..2154: note = Synthetic
  source 1..2154: mol_type = other DNA

SEQ ID NO: 4821 - DNA, 2134 bp, synthetic construct; identical to SEQ ID NO: 2232
  misc_feature 1..2134: note = Synthetic
  source 1..2134: mol_type = other DNA

SEQ ID NO: 4822 - DNA, 2148 bp, synthetic construct; identical to SEQ ID NO: 2233
  misc_feature 1..2148: note = Synthetic
  source 1..2148: mol_type = other DNA

SEQ ID NO: 4823 - DNA, 2154 bp, synthetic construct; identical to SEQ ID NO: 2234
  misc_feature 1..2154: note = Synthetic
  source 1..2154: mol_type = other DNA

SEQ ID NO: 4824 - DNA, 2154 bp, synthetic construct; identical to SEQ ID NO: 2235
  misc_feature 1..2154: note = Synthetic
  source 1..2154: mol_type = other DNA

SEQ ID NO: 4825 - DNA, 2157 bp, synthetic construct; identical to SEQ ID NO: 2236
  misc_feature 1..2157: note = Synthetic
  source 1..2157: mol_type = other DNA

SEQ ID NO: 4826 - DNA, 2151 bp, synthetic construct; identical to SEQ ID NO: 2237
  misc_feature 1..2151: note = Synthetic
  source 1..2151: mol_type = other DNA

SEQ ID NO: 4827 - DNA, 2154 bp, synthetic construct; identical to SEQ ID NO: 2238
  misc_feature 1..2154: note = Synthetic
  source 1..2154: mol_type = other DNA

SEQ ID NO: 4828 - DNA, 2154 bp, synthetic construct; identical to SEQ ID NO: 2239
  misc_feature 1..2154: note = Synthetic
  source 1..2154: mol_type = other DNA

SEQ ID NO: 4829 - DNA, 2169 bp, synthetic construct; identical to SEQ ID NO: 2240
  misc_feature 1..2169: note = Synthetic
  source 1..2169: mol_type = other DNA

SEQ ID NO: 4830 - DNA, 2166 bp, synthetic construct; identical to SEQ ID NO: 2241
  misc_feature 1..2166: note = Synthetic
  source 1..2166: mol_type = other DNA

SEQ ID NO: 4831 - DNA, 2160 bp, synthetic construct; identical to SEQ ID NO: 2242
  misc_feature 1..2160: note = Synthetic
  source 1..2160: mol_type = other DNA

SEQ ID NO: 4832 - DNA, 2160 bp, synthetic construct; identical to SEQ ID NO: 2243
  misc_feature 1..2160: note = Synthetic
  source 1..2160: mol_type = other DNA

SEQ ID NO: 4833 - DNA, 2154 bp, synthetic construct; identical to SEQ ID NO: 2244
  misc_feature 1..2154: note = Synthetic
  source 1..2154: mol_type = other DNA

SEQ ID NO: 4834 - DNA, 2154 bp, synthetic construct; identical to SEQ ID NO: 2245
  misc_feature 1..2154: note = Synthetic
  source 1..2154: mol_type = other DNA

SEQ ID NO: 4835 - DNA, 2157 bp, synthetic construct; identical to SEQ ID NO: 2246
  misc_feature 1..2157: note = Synthetic
  source 1..2157: mol_type = other DNA

SEQ ID NO: 4836 - DNA, 2154 bp, synthetic construct; identical to SEQ ID NO: 2247
  misc_feature 1..2154: note = Synthetic
  source 1..2154: mol_type = other DNA

SEQ ID NO: 4837 - DNA, 2154 bp, synthetic construct; identical to SEQ ID NO: 2248
  misc_feature 1..2154: note = Synthetic
  source 1..2154: mol_type = other DNA

SEQ ID NO: 4838 - DNA, 2151 bp, synthetic construct; identical to SEQ ID NO: 2249
  misc_feature 1..2151: note = Synthetic
  source 1..2151: mol_type = other DNA

SEQ ID NO: 4839 - DNA, 2148 bp, synthetic construct; identical to SEQ ID NO: 2250
  misc_feature 1..2148: note = Synthetic
  source 1..2148: mol_type = other DNA

SEQ ID NO: 4840 - DNA, 2142 bp, synthetic construct; identical to SEQ ID NO: 2137
  misc_feature 1..2142: note = Synthetic
  source 1..2142: mol_type = other DNA

SEQ ID NO: 4841 - DNA, 2148 bp, synthetic construct; identical to SEQ ID NO: 2252
  misc_feature 1..2148: note = Synthetic
  source 1..2148: mol_type = other DNA

SEQ ID NO: 4842 - DNA, 2154 bp, synthetic construct; identical to SEQ ID NO: 2253
  misc_feature 1..2154: note = Synthetic
  source 1..2154: mol_type = other DNA

SEQ ID NO: 4843 - DNA, 2154 bp, synthetic construct; identical to SEQ ID NO: 2254
  misc_feature 1..2154: note = Synthetic
  source 1..2154: mol_type = other DNA

SEQ ID NO: 4844 - DNA, 2157 bp, synthetic construct; identical to SEQ ID NO: 2255
  misc_feature 1..2157: note = Synthetic
  source 1..2157: mol_type = other DNA

SEQ ID NO: 4845 - DNA, 2151 bp, synthetic construct; identical to SEQ ID NO: 2256
  misc_feature 1..2151: note = Synthetic
  source 1..2151: mol_type = other DNA

SEQ ID NO: 4846 - DNA, 2154 bp, synthetic construct; identical to SEQ ID NO: 2257
  misc_feature 1..2154: note = Synthetic
  source 1..2154: mol_type = other DNA

SEQ ID NO: 4847 - DNA, 2154 bp, synthetic construct; identical to SEQ ID NO: 2258
  misc_feature 1..2154: note = Synthetic
  source 1..2154: mol_type = other DNA

SEQ ID NO: 4848 - DNA, 2169 bp, synthetic construct; identical to SEQ ID NO: 2259
  misc_feature 1..2169: note = Synthetic
  source 1..2169: mol_type = other DNA

SEQ ID NO: 4849 - DNA, 2166 bp, synthetic construct; identical to SEQ ID NO: 2260
  misc_feature 1..2166: note = Synthetic
  source 1..2166: mol_type = other DNA

SEQ ID NO: 4850 - DNA, 2160 bp, synthetic construct; identical to SEQ ID NO: 2261
  misc_feature 1..2160: note = Synthetic
  source 1..2160: mol_type = other DNA

SEQ ID NO: 4851 - DNA, 2160 bp, synthetic construct; identical to SEQ ID NO: 2262
  misc_feature 1..2160: note = Synthetic
  source 1..2160: mol_type = other DNA

SEQ ID NO: 4852 - DNA, 2154 bp, synthetic construct; identical to SEQ ID NO: 2263
  misc_feature 1..2154: note = Synthetic
  source 1..2154: mol_type = other DNA

SEQ ID NO: 4853 - DNA, 2154 bp, synthetic construct; identical to SEQ ID NO: 2264
  misc_feature 1..2154: note = Synthetic
  source 1..2154: mol_type = other DNA

SEQ ID NO: 4854 - DNA, 2157 bp, synthetic construct; identical to SEQ ID NO: 2265
  misc_feature 1..2157: note = Synthetic
  source 1..2157: mol_type = other DNA

SEQ ID NO: 4855 - protein, 493 aa, synthetic construct; identical to SEQ ID NO: 2266
  REGION 1..493: note = Synthetic

SEQ ID NO: 4856 - protein, 493 aa, synthetic construct; identical to SEQ ID NO: 2267
  REGION 1..493: note = Synthetic

SEQ ID NO: 4857 - protein, 492 aa, synthetic construct; identical to SEQ ID NO: 2268
  REGION 1..492: note = Synthetic

SEQ ID NO: 4858 - protein, 493 aa, synthetic construct; identical to SEQ ID NO: 2269
  REGION 1..493: note = Synthetic

SEQ ID NO: 4859 - protein, 486 aa, synthetic construct; identical to SEQ ID NO: 2270
  REGION 1..486: note = Synthetic

SEQ ID NO: 4860 - protein, 491 aa, synthetic construct; identical to SEQ ID NO: 2271
  REGION 1..491: note = Synthetic

SEQ ID NO: 4861 - protein, 493 aa, synthetic construct; identical to SEQ ID NO: 2272
  REGION 1..493: note = Synthetic

SEQ ID NO: 4862 - protein, 493 aa, synthetic construct; identical to SEQ ID NO: 2273
  REGION 1..493: note = Synthetic

SEQ ID NO: 4863 - protein, 494 aa, synthetic construct; identical to SEQ ID NO: 2274
  REGION 1..494: note = Synthetic

SEQ ID NO: 4864 - protein, 492 aa, synthetic construct; identical to SEQ ID NO: 2275
  REGION 1..492: note = Synthetic

SEQ ID NO: 4865 - protein, 493 aa, synthetic construct; identical to SEQ ID NO: 2276
  REGION 1..493: note = Synthetic

SEQ ID NO: 4866 - protein, 493 aa, synthetic construct; identical to SEQ ID NO: 2277
  REGION 1..493: note = Synthetic

SEQ ID NO: 4867 - protein, 498 aa, synthetic construct; identical to SEQ ID NO: 2278
  REGION 1..498: note = Synthetic

SEQ ID NO: 4868 - protein, 497 aa, synthetic construct; identical to SEQ ID NO: 2279
  REGION 1..497: note = Synthetic

SEQ ID NO: 4869 - protein, 495 aa, synthetic construct; identical to SEQ ID NO: 2280
  REGION 1..495: note = Synthetic

SEQ ID NO: 4870 - protein, 495 aa, synthetic construct; identical to SEQ ID NO: 2281
  REGION 1..495: note = Synthetic

SEQ ID NO: 4871 - protein, 493 aa, synthetic construct; identical to SEQ ID NO: 2282
  REGION 1..493: note = Synthetic

SEQ ID NO: 4872 - protein, 493 aa, synthetic construct; identical to SEQ ID NO: 2283
  REGION 1..493: note = Synthetic

SEQ ID NO: 4873 - protein, 494 aa, synthetic construct; identical to SEQ ID NO: 2284
  REGION 1..494: note = Synthetic

SEQ ID NO: 4874 - DNA, 1479 bp, synthetic construct; identical to SEQ ID NO: 2285
  misc_feature 1..1479: note = Synthetic
  source 1..1479: mol_type = other DNA

SEQ ID NO: 4875 - DNA, 1479 bp, synthetic construct; identical to SEQ ID NO: 2286
  misc_feature 1..1479: note = Synthetic
  source 1..1479: mol_type = other DNA

SEQ ID NO: 4876 - DNA, 1476 bp, synthetic construct; identical to SEQ ID NO: 2287
  misc_feature 1..1476: note = Synthetic
  source 1..1476: mol_type = other DNA

SEQ ID NO: 4877 - DNA, 1479 bp, synthetic construct; identical to SEQ ID NO: 2288
  misc_feature 1..1479: note = Synthetic
  source 1..1479: mol_type = other DNA

SEQ ID NO: 4878 - DNA, 1459 bp, synthetic construct; identical to SEQ ID NO: 2289
  misc_feature 1..1459: note = Synthetic
  source 1..1459: mol_type = other DNA

SEQ ID NO: 4879 - DNA, 1473 bp, synthetic construct; identical to SEQ ID NO: 2290
  misc_feature 1..1473: note = Synthetic
  source 1..1473: mol_type = other DNA

SEQ ID NO: 4880 - DNA, 1479 bp, synthetic construct; identical to SEQ ID NO: 2291
  misc_feature 1..1479: note = Synthetic
  source 1..1479: mol_type = other DNA

SEQ ID NO: 4881 - DNA, 1479 bp, synthetic construct; identical to SEQ ID NO: 2292
  misc_feature 1..1479: note = Synthetic
  source 1..1479: mol_type = other DNA

SEQ ID NO: 4882 - DNA, 1482 bp, synthetic construct; identical to SEQ ID NO: 2293
  misc_feature 1..1482: note = Synthetic
  source 1..1482: mol_type = other DNA

SEQ ID NO: 4883 - DNA, 1476 bp, synthetic construct; identical to SEQ ID NO: 2294
  misc_feature 1..1476: note = Synthetic
  source 1..1476: mol_type = other DNA

SEQ ID NO: 4884 - DNA, 1479 bp, synthetic construct; identical to SEQ ID NO: 2295
  misc_feature 1..1479: note = Synthetic
  source 1..1479: mol_type = other DNA

SEQ ID NO: 4885 - DNA, 1479 bp, synthetic construct; identical to SEQ ID NO: 2296
  misc_feature 1..1479: note = Synthetic
  source 1..1479: mol_type = other DNA

SEQ ID NO: 4886 - DNA, 1494 bp, synthetic construct; identical to SEQ ID NO: 2297
  misc_feature 1..1494: note = Synthetic
  source 1..1494: mol_type = other DNA

SEQ ID NO: 4887 - DNA, 1491 bp, synthetic construct; identical to SEQ ID NO: 2298
  misc_feature 1..1491: note = Synthetic
  source 1..1491: mol_type = other DNA

SEQ ID NO: 4888 - DNA, 1485 bp, synthetic construct; identical to SEQ ID NO: 2299
  misc_feature 1..1485: note = Synthetic
  source 1..1485: mol_type = other DNA

SEQ ID NO: 4889 - DNA, 1485 bp, synthetic construct; identical to SEQ ID NO: 2300
  misc_feature 1..1485: note = Synthetic
  source 1..1485: mol_type = other DNA

SEQ ID NO: 4890 - DNA, 1479 bp, synthetic construct; identical to SEQ ID NO: 2301
  misc_feature 1..1479: note = Synthetic
  source 1..1479: mol_type = other DNA

SEQ ID NO: 4891 - DNA, 1479 bp, synthetic construct; identical to SEQ ID NO: 2302
  misc_feature 1..1479: note = Synthetic
  source 1..1479: mol_type = other DNA

SEQ ID NO: 4892 - DNA, 1482 bp, synthetic construct; identical to SEQ ID NO: 2303
  misc_feature 1..1482: note = Synthetic
  source 1..1482: mol_type = other DNA

SEQ ID NO: 4893 - DNA, 1479 bp, synthetic construct; identical to SEQ ID NO: 2304
  misc_feature 1..1479: note = Synthetic
  source 1..1479: mol_type = other DNA

SEQ ID NO: 4894 - DNA, 1479 bp, synthetic construct; identical to SEQ ID NO: 2305
  misc_feature 1..1479: note = Synthetic
  source 1..1479: mol_type = other DNA

SEQ ID NO: 4895 - DNA, 1476 bp, synthetic construct; identical to SEQ ID NO: 2306
  misc_feature 1..1476: note = Synthetic
  source 1..1476: mol_type = other DNA

SEQ ID NO: 4896 - DNA, 1473 bp, synthetic construct; identical to SEQ ID NO: 2307
  misc_feature 1..1473: note = Synthetic
  source 1..1473: mol_type = other DNA

SEQ ID NO: 4897 - DNA, 1467 bp, synthetic construct; identical to SEQ ID NO: 2308
  misc_feature 1..1467: note = Synthetic
  source 1..1467: mol_type = other DNA

SEQ ID NO: 4898 - DNA, 1473 bp, synthetic construct; identical to SEQ ID NO: 2309
  misc_feature 1..1473: note = Synthetic
  source 1..1473: mol_type = other DNA

SEQ ID NO: 4899 - DNA, 1479 bp, synthetic construct; identical to SEQ ID NO: 2310
  misc_feature 1..1479: note = Synthetic
  source 1..1479: mol_type = other DNA

SEQ ID NO: 4900 - DNA, 1479 bp, synthetic construct; identical to SEQ ID NO: 2311
  misc_feature 1..1479: note = Synthetic
  source 1..1479: mol_type = other DNA

SEQ ID NO: 4901 - DNA, 1482 bp, synthetic construct; identical to SEQ ID NO: 2312
  misc_feature 1..1482: note = Synthetic
  source 1..1482: mol_type = other DNA

SEQ ID NO: 4902 - DNA, 1476 bp, synthetic construct; identical to SEQ ID NO: 2313
  misc_feature 1..1476: note = Synthetic
  source 1..1476: mol_type = other DNA

SEQ ID NO: 4903 - DNA, 1479 bp, synthetic construct; identical to SEQ ID NO: 2314
  misc_feature 1..1479: note = Synthetic
  source 1..1479: mol_type = other DNA

SEQ ID NO: 4904 - DNA, 1479 bp, synthetic construct; identical to SEQ ID NO: 2315
  misc_feature 1..1479: note = Synthetic
  source 1..1479: mol_type = other DNA

SEQ ID NO: 4905 - DNA, 1494 bp, synthetic construct; identical to SEQ ID NO: 2316
  misc_feature 1..1494: note = Synthetic
  source 1..1494: mol_type = other DNA

SEQ ID NO: 4906 - DNA, 1491 bp, synthetic construct; identical to SEQ ID NO: 2317
  misc_feature 1..1491: note = Synthetic
  source 1..1491: mol_type = other DNA

SEQ ID NO: 4907 - DNA, 1485 bp, synthetic construct; identical to SEQ ID NO: 2318
  misc_feature 1..1485: note = Synthetic
  source 1..1485: mol_type = other DNA

SEQ ID NO: 4908 - DNA, 1485 bp, synthetic construct; identical to SEQ ID NO: 2319
  misc_feature 1..1485: note = Synthetic
  source 1..1485: mol_type = other DNA

SEQ ID NO: 4909 - DNA, 1479 bp, synthetic construct; identical to SEQ ID NO: 2320
  misc_feature 1..1479: note = Synthetic
  source 1..1479: mol_type = other DNA

SEQ ID NO: 4910 - DNA, 1479 bp, synthetic construct; identical to SEQ ID NO: 2321
  misc_feature 1..1479: note = Synthetic
  source 1..1479: mol_type = other DNA

SEQ ID NO: 4911 - DNA, 1482 bp, synthetic construct; identical to SEQ ID NO: 2322
  misc_feature 1..1482: note = Synthetic
  source 1..1482: mol_type = other DNA

SEQ ID NO: 4912 - protein, 718 aa, synthetic construct; identical to SEQ ID NO: 2323
  REGION 1..718: note = Synthetic

SEQ ID NO: 4913 - protein, 718 aa, synthetic construct; identical to SEQ ID NO: 2324
  REGION 1..718: note = Synthetic

SEQ ID NO: 4914 - protein, 717 aa, synthetic construct; identical to SEQ ID NO: 2325
  REGION 1..717: note = Synthetic

SEQ ID NO: 4915 - protein, 718 aa, synthetic construct; identical to SEQ ID NO: 2326
  REGION 1..718: note = Synthetic

SEQ ID NO: 4916 - protein, 711 aa, synthetic construct; identical to SEQ ID NO: 2327
  REGION 1..711: note = Synthetic

SEQ ID NO: 4917 - protein, 716 aa, synthetic construct; identical to SEQ ID NO: 2328
  REGION 1..716: note = Synthetic

SEQ ID NO: 4918 - protein, 718 aa, synthetic construct; identical to SEQ ID NO: 2329
  REGION 1..718: note = Synthetic

SEQ ID NO: 4919 - protein, 718 aa, synthetic construct; identical to SEQ ID NO: 2330
  REGION 1..718: note = Synthetic

SEQ ID NO: 4920 - protein, 719 aa, synthetic construct; identical to SEQ ID NO: 2331
  REGION 1..719: note = Synthetic

SEQ ID NO: 4921 - protein, 717 aa, synthetic construct; identical to SEQ ID NO: 2332
  REGION 1..717: note = Synthetic

SEQ ID NO: 4922 - protein, 718 aa, synthetic construct; identical to SEQ ID NO: 2333
  REGION 1..718: note = Synthetic

SEQ ID NO: 4923 - protein, 718 aa, synthetic construct; identical to SEQ ID NO: 2334
  REGION 1..718: note = Synthetic

SEQ ID NO: 4924 - protein, 723 aa, synthetic construct; identical to SEQ ID NO: 2335
  REGION 1..723: note = Synthetic

SEQ ID NO: 4925 - protein, 722 aa, synthetic construct; identical to SEQ ID NO: 2336
  REGION 1..722: note = Synthetic

SEQ ID NO: 4926 - protein, 720 aa, synthetic construct; identical to SEQ ID NO: 2337
  REGION 1..720: note = Synthetic

SEQ ID NO: 4927 - protein, 720 aa, synthetic construct; identical to SEQ ID NO: 2338
  REGION 1..720: note = Synthetic

SEQ ID NO: 4928 - protein, 718 aa, synthetic construct; identical to SEQ ID NO: 2339
  REGION 1..718: note = Synthetic

SEQ ID NO: 4929 - protein, 718 aa, synthetic construct; identical to SEQ ID NO: 2340
  REGION 1..718: note = Synthetic

SEQ ID NO: 4930 - protein, 719 aa, synthetic construct; identical to SEQ ID NO: 2341
  REGION 1..719: note = Synthetic

SEQ ID NO: 4931 - DNA, 2157 bp, synthetic construct; identical to SEQ ID NO: 2342
  misc_feature 1..2157: note = Synthetic
  source 1..2157: mol_type = other DNA

SEQ ID NO: 4932 - DNA, 2157 bp, synthetic construct; identical to SEQ ID NO: 2343
  misc_feature 1..2157: note = Synthetic
  source 1..2157: mol_type = other DNA

SEQ ID NO: 4933 - DNA, 2154 bp, synthetic construct; identical to SEQ ID NO: 2344
  misc_feature 1..2154: note = Synthetic
  source 1..2154: mol_type = other DNA

SEQ ID NO: 4934 - DNA, 2157 bp, synthetic construct; identical to SEQ ID NO: 2345
  misc_feature 1..2157: note = Synthetic
  source 1..2157: mol_type = other DNA

SEQ ID NO: 4935 - DNA, 2137 bp, synthetic construct; identical to SEQ ID NO: 2346
  misc_feature 1..2137: note = Synthetic
  source 1..2137: mol_type = other DNA

SEQ ID NO: 4936 - DNA, 2151 bp, synthetic construct; identical to SEQ ID NO: 2347
  misc_feature 1..2151: note = Synthetic
  source 1..2151: mol_type = other DNA

SEQ ID NO: 4937 - DNA, 2157 bp, synthetic construct; identical to SEQ ID NO: 2348
  misc_feature 1..2157: note = Synthetic
  source 1..2157: mol_type = other DNA

SEQ ID NO: 4938 - DNA, 2157 bp, synthetic construct; identical to SEQ ID NO: 2349
  misc_feature 1..2157: note = Synthetic
  source 1..2157: mol_type = other DNA

SEQ ID NO: 4939 - DNA, 2160 bp, synthetic construct; identical to SEQ ID NO: 2350
  misc_feature 1..2160: note = Synthetic
  source 1..2160: mol_type = other DNA

SEQ ID NO: 4940 - DNA, 2154 bp, synthetic construct; identical to SEQ ID NO: 2351
  misc_feature 1..2154: note = Synthetic
  source 1..2154: mol_type = other DNA

SEQ ID NO: 4941 - DNA, 2157 bp, synthetic construct; identical to SEQ ID NO: 2352
  misc_feature 1..2157: note = Synthetic
  source 1..2157: mol_type = other DNA

SEQ ID NO: 4942 - DNA, 2157 bp, synthetic construct; identical to SEQ ID NO: 2353
  misc_feature 1..2157: note = Synthetic
  source 1..2157: mol_type = other DNA

SEQ ID NO: 4943 - DNA, 2172 bp, synthetic construct; identical to SEQ ID NO: 2354
  misc_feature 1..2172: note = Synthetic
  source 1..2172: mol_type = other DNA

SEQ ID NO: 4944 - DNA, 2169 bp, synthetic construct; identical to SEQ ID NO: 2355
  misc_feature 1..2169: note = Synthetic
  source 1..2169: mol_type = other DNA

SEQ ID NO: 4945 - DNA, 2163 bp, synthetic construct; identical to SEQ ID NO: 2356
  misc_feature 1..2163: note = Synthetic
  source 1..2163: mol_type = other DNA

SEQ ID NO: 4946 - DNA, 2163 bp, synthetic construct; identical to SEQ ID NO: 2357
  misc_feature 1..2163: note = Synthetic
  source 1..2163: mol_type = other DNA

SEQ ID NO: 4947 - DNA, 2157 bp, synthetic construct; identical to SEQ ID NO: 2358
  misc_feature 1..2157: note = Synthetic
  source 1..2157: mol_type = other DNA

SEQ ID NO: 4948 - DNA, 2157 bp, synthetic construct; identical to SEQ ID NO: 2359
  misc_feature 1..2157: note = Synthetic
  source 1..2157: mol_type = other DNA

SEQ ID NO: 4949 - DNA, 2160 bp, synthetic construct; identical to SEQ ID NO: 2360
  misc_feature 1..2160: note = Synthetic
  source 1..2160: mol_type = other DNA

SEQ ID NO: 4950 - DNA, 2157 bp, synthetic construct; identical to SEQ ID NO: 2361
  misc_feature 1..2157: note = Synthetic
  source 1..2157: mol_type = other DNA

SEQ ID NO: 4951 - DNA, 2157 bp, synthetic construct; identical to SEQ ID NO: 2362
  misc_feature 1..2157: note = Synthetic
  source 1..2157: mol_type = other DNA

SEQ ID NO: 4952 - DNA, 2154 bp, synthetic construct; identical to SEQ ID NO: 2363
  misc_feature 1..2154: note = Synthetic
  source 1..2154: mol_type = other DNA

SEQ ID NO: 4953 - DNA, 2151 bp, synthetic construct; identical to SEQ ID NO: 2364
  misc_feature 1..2151: note = Synthetic
  source 1..2151: mol_type = other DNA

SEQ ID NO: 4954 - DNA, 2145 bp, synthetic construct; identical to SEQ ID NO: 2365
  misc_feature 1..2145: note = Synthetic
  source 1..2145: mol_type = other DNA

SEQ ID NO: 4955 - DNA, 2151 bp, synthetic construct; identical to SEQ ID NO: 2366
  misc_feature 1..2151: note = Synthetic
  source 1..2151: mol_type = other DNA

SEQ ID NO: 4956 - DNA, 2157 bp, synthetic construct; identical to SEQ ID NO: 2367
  misc_feature 1..2157: note = Synthetic
  source 1..2157: mol_type = other DNA

SEQ ID NO: 4957 - DNA, 2157 bp, synthetic construct; identical to SEQ ID NO: 2368
  misc_feature 1..2157: note = Synthetic
  source 1..2157: mol_type = other DNA

SEQ ID NO: 4958 - DNA, 2160 bp, synthetic construct; identical to SEQ ID NO: 2369
  misc_feature 1..2160: note = Synthetic
  source 1..2160: mol_type = other DNA

SEQ ID NO: 4959 - DNA, 2154 bp, synthetic construct; identical to SEQ ID NO: 2370
  misc_feature 1..2154: note = Synthetic
  source 1..2154: mol_type = other DNA

SEQ ID NO: 4960 - DNA, 2157 bp, synthetic construct; identical to SEQ ID NO: 2371
  misc_feature 1..2157: note = Synthetic
  source 1..2157: mol_type = other DNA

SEQ ID NO: 4961 - DNA, 2157 bp, synthetic construct; identical to SEQ ID NO: 2372
  misc_feature 1..2157: note = Synthetic
  source 1..2157: mol_type = other DNA

SEQ ID NO: 4962 - DNA, 2172 bp, synthetic construct; identical to SEQ ID NO: 2373
  misc_feature 1..2172: note = Synthetic
  source 1..2172: mol_type = other DNA

SEQ ID NO: 4963 - DNA, 2169 bp, synthetic construct; identical to SEQ ID NO: 2374
  misc_feature 1..2169: note = Synthetic
  source 1..2169: mol_type = other DNA

SEQ ID NO: 4964 - DNA, 2163 bp, synthetic construct; identical to SEQ ID NO: 2375
  misc_feature 1..2163: note = Synthetic
  source 1..2163: mol_type = other DNA

SEQ ID NO: 4965 - DNA, 2163 bp, synthetic construct; identical to SEQ ID NO: 2376
  misc_feature 1..2163: note = Synthetic
  source 1..2163: mol_type = other DNA

SEQ ID NO: 4966 - DNA, 2157 bp, synthetic construct; identical to SEQ ID NO: 2377
  misc_feature 1..2157: note = Synthetic
  source 1..2157: mol_type = other DNA

SEQ ID NO: 4967 - DNA, 2157 bp, synthetic construct; identical to SEQ ID NO: 2378
  misc_feature 1..2157: note = Synthetic
  source 1..2157: mol_type = other DNA

SEQ ID NO: 4968 - DNA, 2160 bp, synthetic construct; identical to SEQ ID NO: 2379
  misc_feature 1..2160: note = Synthetic
  source 1..2160: mol_type = other DNA

SEQ ID NO: 4969 - protein, 494 aa, synthetic construct; identical to SEQ ID NO: 2393
  REGION 1..494: note = Synthetic

SEQ ID NO: 4970 - protein, 494 aa, synthetic construct; identical to SEQ ID NO: 2394
  REGION 1..494: note = Synthetic

SEQ ID NO: 4971 - protein, 494 aa, synthetic construct; identical to SEQ ID NO: 2395
  REGION 1..494: note = Synthetic

SEQ ID NO: 4972 - protein, 488 aa, synthetic construct; identical to SEQ ID NO: 2396
  REGION 1..488: note = Synthetic

SEQ ID NO: 4973 - protein, 494 aa, synthetic construct; identical to SEQ ID NO: 2397
  REGION 1..494: note = Synthetic

SEQ ID NO: 4974 - protein, 492 aa, synthetic construct; identical to SEQ ID NO: 2398
  REGION 1..492: note = Synthetic

SEQ ID NO: 4975 - protein, 488 aa, synthetic construct; identical to SEQ ID NO: 2399
  REGION 1..488: note = Synthetic

SEQ ID NO: 4976 - protein, 488 aa, synthetic construct; identical to SEQ ID NO: 2400
  REGION 1..488: note = Synthetic

SEQ ID NO: 4977 - protein, 488 aa, synthetic construct; identical to SEQ ID NO: 2401
  REGION 1..488: note = Synthetic

SEQ ID NO: 4978 - protein, 494 aa, synthetic construct; identical to SEQ ID NO: 2402
  REGION 1..494: note = Synthetic

SEQ ID NO: 4979 - protein, 488 aa, synthetic construct; identical to SEQ ID NO: 2403
  REGION 1..488: note = Synthetic

SEQ ID NO: 4980 - protein, 494 aa, synthetic construct; identical to SEQ ID NO: 2404
  REGION 1..494: note = Synthetic

SEQ ID NO: 4981 - protein, 499 aa, synthetic construct; identical to SEQ ID NO: 2405
  REGION 1..499: note = Synthetic

SEQ ID NO: 4982 - protein, 486 aa, synthetic construct; identical to SEQ ID NO: 2406
  REGION 1..486: note = Synthetic

SEQ ID NO: 4983 - protein, 494 aa, synthetic construct; identical to SEQ ID NO: 2407
  REGION 1..494: note = Synthetic

SEQ ID NO: 4984 - protein, 494 aa, synthetic construct; identical to SEQ ID NO: 2408
  REGION 1..494: note = Synthetic

SEQ ID NO: 4985 - protein, 490 aa, synthetic construct; identical to SEQ ID NO: 2409
  REGION 1..490: note = Synthetic

SEQ ID NO: 4986 - protein, 498 aa, synthetic construct; identical to SEQ ID NO: 2410
  REGION 1..498: note = Synthetic

SEQ ID NO: 4987 - protein, 492 aa, synthetic construct; identical to SEQ ID NO: 2411
  REGION 1..492: note = Synthetic

SEQ ID NO: 4988 - protein, 491 aa, synthetic construct; identical to SEQ ID NO: 2412
  REGION 1..491: note = Synthetic

SEQ ID NO: 4989 - protein, 495 aa, synthetic construct; identical to SEQ ID NO: 2413
  REGION 1..495: note = Synthetic

SEQ ID NO: 4990 - protein, 495 aa, synthetic construct; identical to SEQ ID NO: 2414
  REGION 1..495: note = Synthetic

SEQ ID NO: 4991 - protein, 492 aa, synthetic construct; identical to SEQ ID NO: 2415
  REGION 1..492: note = Synthetic

SEQ ID NO: 4992 - protein, 492 aa, synthetic construct; identical to SEQ ID NO: 2416
  REGION 1..492: note = Synthetic

SEQ ID NO: 4993 - protein, 491 aa, synthetic construct; identical to SEQ ID NO: 2417
  REGION 1..491: note = Synthetic

SEQ ID NO: 4994 - protein, 492 aa, synthetic construct; identical to SEQ ID NO: 2418
  REGION 1..492: note = Synthetic

SEQ ID NO: 4995 - DNA, 1482 bp, synthetic construct; identical to SEQ ID NO: 2419
  misc_feature 1..1482: note = Synthetic
  source 1..1482: mol_type = other DNA

SEQ ID NO: 4996 - DNA, 1482 bp, synthetic construct; identical to SEQ ID NO: 2420
  misc_feature 1..1482: note = Synthetic
  source 1..1482: mol_type = other DNA

SEQ ID NO: 4997 - DNA, 1482 bp, synthetic construct; identical to SEQ ID NO: 2421
  misc_feature 1..1482: note = Synthetic
  source 1..1482: mol_type = other DNA

SEQ ID NO: 4998 - DNA, 1464 bp, synthetic construct; identical to SEQ ID NO: 2422
  misc_feature 1..1464: note = Synthetic
  source 1..1464: mol_type = other DNA

SEQ ID NO: 4999 - DNA, 1482 bp, synthetic construct; identical to SEQ ID NO: 2423
  misc_feature 1..1482: note = Synthetic
  source 1..1482: mol_type = other DNA

SEQ ID NO: 5000 - DNA, 1476 bp, synthetic construct; identical to SEQ ID NO: 2424
  misc_feature 1..1476: note = Synthetic
  source 1..1476: mol_type = other DNA

SEQ ID NO: 5001 - DNA, 1464 bp, synthetic construct; identical to SEQ ID NO: 2425
  misc_feature 1..1464: note = Synthetic
  source 1..1464: mol_type = other DNA

SEQ ID NO: 5002 - DNA, 1464 bp, synthetic construct; identical to SEQ ID NO: 2426
  misc_feature 1..1464: note = Synthetic
  source 1..1464: mol_type = other DNA

SEQ ID NO: 5003 - DNA, 1464 bp, synthetic construct; identical to SEQ ID NO: 2427
  misc_feature 1..1464: note = Synthetic
  source 1..1464: mol_type = other DNA

SEQ ID NO: 5004 - DNA, 1482 bp, synthetic construct; identical to SEQ ID NO: 2428
  misc_feature 1..1482: note = Synthetic
  source 1..1482: mol_type = other DNA

SEQ ID NO: 5005 - DNA, 1464 bp, synthetic construct; identical to SEQ ID NO: 2429
  misc_feature 1..1464: note = Synthetic
  source 1..1464: mol_type = other DNA

SEQ ID NO: 5006 - DNA, 1482 bp, synthetic construct; identical to SEQ ID NO: 2430
  misc_feature 1..1482: note = Synthetic
  source 1..1482: mol_type = other DNA

SEQ ID NO: 5007 - DNA, 1497 bp, synthetic construct; identical to SEQ ID NO: 2431
  misc_feature 1..1497: note = Synthetic
  source 1..1497: mol_type = other DNA

SEQ ID NO: 5008 - DNA, 1458 bp, synthetic construct; identical to SEQ ID NO: 2432
  misc_feature 1..1458: note = Synthetic
  source 1..1458: mol_type = other DNA

SEQ ID NO: 5009 - DNA, 1482 bp, synthetic construct; identical to SEQ ID NO: 2433
  misc_feature 1..1482: note = Synthetic
  source 1..1482: mol_type = other DNA

SEQ ID NO: 5010 - DNA, 1482 bp, synthetic construct; identical to SEQ ID NO: 2434
  misc_feature 1..1482: note = Synthetic
  source 1..1482: mol_type = other DNA

SEQ ID NO: 5011 - DNA, 1470 bp, synthetic construct; identical to SEQ ID NO: 2435
  misc_feature 1..1470: note = Synthetic
  source 1..1470: mol_type = other DNA

SEQ ID NO: 5012 - DNA, 1494 bp, synthetic construct; identical to SEQ ID NO: 2436
  misc_feature 1..1494: note = Synthetic
  source 1..1494: mol_type = other DNA

SEQ ID NO: 5013 - DNA, 1476 bp, synthetic construct; identical to SEQ ID NO: 2437
  misc_feature 1..1476: note = Synthetic
  source 1..1476: mol_type = other DNA

SEQ ID NO: 5014 - DNA, 1473 bp, synthetic construct; identical to SEQ ID NO: 2438
  misc_feature 1..1473: note = Synthetic
  source 1..1473: mol_type = other DNA

SEQ ID NO: 5015 - DNA, 1485 bp, synthetic construct; identical to SEQ ID NO: 2439
  misc_feature 1..1485: note = Synthetic
  source 1..1485: mol_type = other DNA

SEQ ID NO: 5016 - DNA, 1485 bp, synthetic construct; identical to SEQ ID NO: 2440
  misc_feature 1..1485: note = Synthetic
  source 1..1485: mol_type = other DNA

SEQ ID NO: 5017 - DNA, 1476 bp, synthetic construct; identical to SEQ ID NO: 2441
  misc_feature 1..1476: note = Synthetic
  source 1..1476: mol_type = other DNA

SEQ ID NO: 5018 - DNA, 1476 bp, synthetic construct; identical to SEQ ID NO: 2442
  misc_feature 1..1476: note = Synthetic
  source 1..1476: mol_type = other DNA

SEQ ID NO: 5019 - DNA, 1473 bp, synthetic construct; identical to SEQ ID NO: 2443
  misc_feature 1..1473: note = Synthetic
  source 1..1473: mol_type = other DNA

SEQ ID NO: 5020 - DNA, 1476 bp, synthetic construct; identical to SEQ ID NO: 2444
  misc_feature 1..1476: note = Synthetic
  source 1..1476: mol_type = other DNA

SEQ ID NO: 5021 - DNA, 1482 bp, synthetic construct; identical to SEQ ID NO: 2445
  misc_feature 1..1482: note = Synthetic
  source 1..1482: mol_type = other DNA

SEQ ID NO: 5022 - DNA, 1482 bp, synthetic construct; identical to SEQ ID NO: 2446
  misc_feature 1..1482: note = Synthetic
  source 1..1482: mol_type = other DNA

SEQ ID NO: 5023 - DNA, 1482 bp, synthetic construct; identical to SEQ ID NO: 2447
  misc_feature 1..1482: note = Synthetic
  source 1..1482: mol_type = other DNA

SEQ ID NO: 5024 - DNA, 1464 bp, synthetic construct; identical to SEQ ID NO: 2448
  misc_feature 1..1464: note = Synthetic
  source 1..1464: mol_type = other DNA

SEQ ID NO: 5025 - DNA, 1482 bp, synthetic construct; identical to SEQ ID NO: 2449
  misc_feature 1..1482: note = Synthetic
  source 1..1482: mol_type = other DNA

SEQ ID NO: 5026 - DNA, 1476 bp, synthetic construct; identical to SEQ ID NO: 2450
  misc_feature 1..1476: note = Synthetic
  source 1..1476: mol_type = other DNA

SEQ ID NO: 5027 - DNA, 1464 bp, synthetic construct; identical to SEQ ID NO: 2451
  misc_feature 1..1464: note = Synthetic
  source 1..1464: mol_type = other DNA

SEQ ID NO: 5028 - DNA, 1464 bp, synthetic construct; identical to SEQ ID NO: 2452
  misc_feature 1..1464: note = Synthetic
  source 1..1464: mol_type = other DNA

SEQ ID NO: 5029 - DNA, 1464 bp, synthetic construct; identical to SEQ ID NO: 2453
  misc_feature 1..1464: note = Synthetic
  source 1..1464: mol_type = other DNA

SEQ ID NO: 5030 - DNA, 1482 bp, synthetic construct; identical to SEQ ID NO: 2454
  misc_feature 1..1482: note = Synthetic
  source 1..1482: mol_type = other DNA

SEQ ID NO: 5031 - DNA, 1464 bp, synthetic construct; identical to SEQ ID NO: 2455
  misc_feature 1..1464: note = Synthetic
  source 1..1464: mol_type = other DNA

SEQ ID NO: 5032 - DNA, 1482 bp, synthetic construct; identical to SEQ ID NO: 2456
  misc_feature 1..1482: note = Synthetic
  source 1..1482: mol_type = other DNA

SEQ ID NO: 5033 - DNA, 1497 bp, synthetic construct; identical to SEQ ID NO: 2457
  misc_feature 1..1497: note = Synthetic
  source 1..1497: mol_type = other DNA

SEQ ID NO: 5034 - DNA, 1458 bp, synthetic construct; identical to SEQ ID NO: 2458
  misc_feature 1..1458: note = Synthetic
  source 1..1458: mol_type = other DNA

SEQ ID NO: 5035 - DNA, 1482 bp, synthetic construct; identical to SEQ ID NO: 2459
  misc_feature 1..1482: note = Synthetic
  source 1..1482: mol_type = other DNA

SEQ ID NO: 5036 - DNA, 1482 bp, synthetic construct; identical to SEQ ID NO: 2460
  misc_feature 1..1482: note = Synthetic
  source 1..1482: mol_type = other DNA

SEQ ID NO: 5037 - DNA, 1470 bp, synthetic construct; identical to SEQ ID NO: 2461
  misc_feature 1..1470: note = Synthetic
  source 1..1470: mol_type = other DNA

SEQ ID NO: 5038 - DNA, 1494 bp, synthetic construct; identical to SEQ ID NO: 2462
  misc_feature 1..1494: note = Synthetic
  source 1..1494: mol_type = other DNA

SEQ ID NO: 5039 - DNA, 1476 bp, synthetic construct; identical to SEQ ID NO: 2463
  misc_feature 1..1476: note = Synthetic
  source 1..1476: mol_type = other DNA

SEQ ID NO: 5040 - DNA, 1473 bp, synthetic construct; identical to SEQ ID NO: 2464
  misc_feature 1..1473: note = Synthetic
  source 1..1473: mol_type = other DNA

SEQ ID NO: 5041 - DNA, 1485 bp, synthetic construct; identical to SEQ ID NO: 2465
  misc_feature 1..1485: note = Synthetic
  source 1..1485: mol_type = other DNA

SEQ ID NO: 5042 - DNA, 1485 bp, synthetic construct; identical to SEQ ID NO: 2466
  misc_feature 1..1485: note = Synthetic
  source 1..1485: mol_type = other DNA

SEQ ID NO: 5043 - DNA, 1476 bp, synthetic construct; identical to SEQ ID NO: 2467
  misc_feature 1..1476: note = Synthetic
  source 1..1476: mol_type = other DNA

SEQ ID NO: 5044 - DNA, 1476 bp, synthetic construct; identical to SEQ ID NO: 2468
  misc_feature 1..1476: note = Synthetic
  source 1..1476: mol_type = other DNA

SEQ ID NO: 5045 - DNA, 1473 bp, synthetic construct; identical to SEQ ID NO: 2469
  misc_feature 1..1473: note = Synthetic
  source 1..1473: mol_type = other DNA

SEQ ID NO: 5046 - DNA, 1476 bp, synthetic construct; identical to SEQ ID NO: 2470
  misc_feature 1..1476: note = Synthetic
  source 1..1476: mol_type = other DNA

SEQ ID NO: 5047 - protein, 719 aa, synthetic construct; identical to SEQ ID NO: 2471
  REGION 1..719: note = Synthetic

SEQ ID NO: 5048 - protein, 719 aa, synthetic construct; identical to SEQ ID NO: 2472
  REGION 1..719: note = Synthetic

SEQ ID NO: 5049 - protein, 719 aa, synthetic construct; identical to SEQ ID NO: 2473
  REGION 1..719: note = Synthetic

SEQ ID NO: 5050 - protein, 713 aa, synthetic construct; identical to SEQ ID NO: 2474
  REGION 1..713: note = Synthetic

SEQ ID NO: 5051 - protein, 719 aa, synthetic construct; identical to SEQ ID NO: 2475
  REGION 1..719: note = Synthetic

SEQ ID NO: 5052 - protein, 717 aa, synthetic construct; identical to SEQ ID NO: 2476
  REGION 1..717: note = Synthetic

SEQ ID NO: 5053 - protein, 713 aa, synthetic construct; identical to SEQ ID NO: 2477
  REGION 1..713: note = Synthetic

SEQ ID NO: 5054 - protein, 713 aa, synthetic construct; identical to SEQ ID NO: 2478
  REGION 1..713: note = Synthetic

SEQ ID NO: 5055 - protein, 713 aa, synthetic construct; identical to SEQ ID NO: 2479
  REGION 1..713: note = Synthetic

SEQ ID NO: 5056 - protein, 719 aa, synthetic construct; identical to SEQ ID NO: 2480
  REGION 1..719: note = Synthetic

SEQ ID NO: 5057 - protein, 713 aa, synthetic construct; identical to SEQ ID NO: 2481
  REGION 1..713: note = Synthetic

SEQ ID NO: 5058 - protein, 719 aa, synthetic construct; identical to SEQ ID NO: 2482
  REGION 1..719: note = Synthetic

SEQ ID NO: 5059 - protein, 724 aa, synthetic construct; identical to SEQ ID NO: 2483
  REGION 1..724: note = Synthetic

SEQ ID NO: 5060 - protein, 711 aa, synthetic construct; identical to SEQ ID NO: 2484
  REGION 1..711: note = Synthetic

SEQ ID NO: 5061 - protein, 719 aa, synthetic construct; identical to SEQ ID NO: 2485
  REGION 1..719: note = Synthetic

SEQ ID NO: 5062 - protein, 719 aa, synthetic construct; identical to SEQ ID NO: 2486
  REGION 1..719: note = Synthetic

SEQ ID NO: 5063 - protein, 715 aa, synthetic construct; identical to SEQ ID NO: 2487
  REGION 1..715: note = Synthetic

SEQ ID NO: 5064 - protein, 723 aa, synthetic construct; identical to SEQ ID NO: 2488
  REGION 1..723: note = Synthetic

SEQ ID NO: 5065 - protein, 717 aa, synthetic construct; identical to SEQ ID NO: 2489
  REGION 1..717: note = Synthetic

SEQ ID NO: 5066 - protein, 716 aa, synthetic construct; identical to SEQ ID NO: 2490
  REGION 1..716: note = Synthetic

SEQ ID NO: 5067 - protein, 720 aa, synthetic construct; identical to SEQ ID NO: 2491
  REGION 1..720: note = Synthetic

SEQ ID NO: 5068 - protein, 720 aa, synthetic construct; identical to SEQ ID NO: 2492
  REGION 1..720: note = Synthetic

SEQ ID NO: 5069 - protein, 717 aa, synthetic construct; identical to SEQ ID NO: 2493
  REGION 1..717: note = Synthetic

SEQ ID NO: 5070 - protein, 717 aa, synthetic construct; identical to SEQ ID NO: 2494
  REGION 1..717: note = Synthetic

SEQ ID NO: 5071 - protein, 727 aa, synthetic construct
  REGION 1..727: note = Synthetic
MALPVTALLLPLALLLHAARPKGGGGSGGGGSEVQLLESGGDLVQPGGSLRLSCAASGFTFSTYAMTWVRQAPGKGLEWVSAISGTSGSTYYADSVKGRFTISRDNSKSTLYLHMNSLRTEDTAVYYCARGGYNWHYYYYMDVWGKGTTVTVSSGGGGSGGGGSGGGGSEIVLTQSPDFQSVTPKEKVTITCRASQSIGSSLHWYQQKPDQSPKLLIKYVSQSISGVPSRFSGSGSGTDFTLTINSLEAEDAAAYYCHQSSSLPWTFGQGTKVEIKAAATTTPAPRPPTPAPTIASQPLSLRPEACRPAAGGAVHTRGLDFACDIYIWAPLAGTCGVLLLSLVITLYCKRGRKKLLYIFKQPFMRPVQTTQEEDGCSCRFPEEEEGGCELRVKFSRSADAPAYQQGQNQLYNELNLGRREEYDVLDKRRGRDPEMGGKPRRKNPQEGLYNELQKDKMAEAYSEIGMKGERRRGKGHDGLYQGLSTATKDTYDALHMQALPPRGSGEGRGSLLTCGDVEENPGPMALPVTALLLPLALLLHAARPNWVNVISDLKKIEDLIQSMHIDATLYTESDVHPSCKVTAMKCFLLELQVISLESGDASIHDTVENLIILANNSLSSNGNVTESGCKECEELEEKNIKEFLQSFVHIVQMFINTSTTTPAPRPPTPAPTIASQPLSLRPEACRPAAGGAVHTRGLDFACDIYIWAPLAGTCGVLLLSLVITLYC

SEQ ID NO: 5072 - protein, 717 aa, synthetic construct; identical to SEQ ID NO: 2496
  REGION 1..717: note = Synthetic

SEQ ID NO: 5073 - DNA, 2157 bp, synthetic construct; identical to SEQ ID NO: 2497
  misc_feature 1..2157: note = Synthetic
  source 1..2157: mol_type = other DNA

SEQ ID NO: 5074 - DNA, 2157 bp, synthetic construct; identical to SEQ ID NO: 2498
  misc_feature 1..2157: note = Synthetic
  source 1..2157: mol_type = other DNA

SEQ ID NO: 5075 - DNA, 2157 bp, synthetic construct; identical to SEQ ID NO: 2499
  misc_feature 1..2157: note = Synthetic
  source 1..2157: mol_type = other DNA

SEQ ID NO: 5076 - DNA, 2139 bp, synthetic construct; identical to SEQ ID NO: 2500
  misc_feature 1..2139: note = Synthetic
  source 1..2139: mol_type = other DNA

SEQ ID NO: 5077 - DNA, 2157 bp, synthetic construct; identical to SEQ ID NO: 2501
  misc_feature 1..2157: note = Synthetic
  source 1..2157: mol_type = other DNA

SEQ ID NO: 5078 - DNA, 2151 bp, synthetic construct; identical to SEQ ID NO: 2502
  misc_feature 1..2151: note = Synthetic
  source 1..2151: mol_type = other DNA

SEQ ID NO: 5079 - DNA, 2139 bp, synthetic construct; identical to SEQ ID NO: 2503
  misc_feature 1..2139: note = Synthetic
  source 1..2139: mol_type = other DNA

SEQ ID NO: 5080 - DNA, 2139 bp, synthetic construct; identical to SEQ ID NO: 2504
  misc_feature 1..2139: note = Synthetic
  source 1..2139: mol_type = other DNA

SEQ ID NO: 5081 - DNA, 2139 bp, synthetic construct; identical to SEQ ID NO: 2505
  misc_feature 1..2139: note = Synthetic
  source 1..2139: mol_type = other DNA

SEQ ID NO: 5082 - DNA, 2157 bp, synthetic construct; identical to SEQ ID NO: 2506
  misc_feature 1..2157: note = Synthetic
  source 1..2157: mol_type = other DNA

SEQ ID NO: 5083 - DNA, 2139 bp, synthetic construct; identical to SEQ ID NO: 2507
  misc_feature 1..2139: note = Synthetic
  source 1..2139: mol_type = other DNA

SEQ ID NO: 5084 - DNA, 2157 bp, synthetic construct; identical to SEQ ID NO: 2508
  misc_feature 1..2157: note = Synthetic
  source 1..2157: mol_type = other DNA

SEQ ID NO: 5085 - DNA, 2172 bp, synthetic construct; identical to SEQ ID NO: 2509
  misc_feature 1..2172: note = Synthetic
  source 1..2172: mol_type = other DNA

SEQ ID NO: 5086 - DNA, 2133 bp, synthetic construct; identical to SEQ ID NO: 2510
  misc_feature 1..2133: note = Synthetic
  source 1..2133: mol_type = other DNA

SEQ ID NO: 5087 - DNA, 2157 bp, synthetic construct; identical to SEQ ID NO: 2511
  misc_feature 1..2157: note = Synthetic
  source 1..2157: mol_type = other DNA

SEQ ID NO: 5088 - DNA, 2157 bp, synthetic construct; identical to SEQ ID NO: 2512
  misc_feature 1..2157: note = Synthetic
  source 1..2157: mol_type = other DNA

SEQ ID NO: 5089 - DNA, 2145 bp, synthetic construct; identical to SEQ ID NO: 2513
  misc_feature 1..2145: note = Synthetic
  source 1..2145: mol_type = other DNA

SEQ ID NO: 5090 - DNA, 2169 bp, synthetic construct; identical to SEQ ID NO: 2514
  misc_feature 1..2169: note = Synthetic
  source 1..2169: mol_type = other DNA

SEQ ID NO: 5091 - DNA, 2151 bp, synthetic construct; identical to SEQ ID NO: 2515
  misc_feature 1..2151: note = Synthetic
  source 1..2151: mol_type = other DNA

SEQ ID NO: 5092 - DNA, 2148 bp, synthetic construct; identical to SEQ ID NO: 2516
  misc_feature 1..2148: note = Synthetic
  source 1..2148: mol_type = other DNA

SEQ ID NO: 5093 - DNA, 2160 bp, synthetic construct; identical to SEQ ID NO: 2517
  misc_feature 1..2160: note = Synthetic
  source 1..2160: mol_type = other DNA

SEQ ID NO: 5094 - DNA, 2160 bp, synthetic construct; identical to SEQ ID NO: 2518
  misc_feature 1..2160: note = Synthetic
  source 1..2160: mol_type = other DNA

SEQ ID NO: 5095 - DNA, 2151 bp, synthetic construct; identical to SEQ ID NO: 2519
  misc_feature 1..2151: note = Synthetic
  source 1..2151: mol_type = other DNA

SEQ ID NO: 5096 - DNA, 2151 bp, synthetic construct; identical to SEQ ID NO: 2520
  misc_feature 1..2151: note = Synthetic
  source 1..2151: mol_type = other DNA

SEQ ID NO: 5097 - DNA, 2148 bp, synthetic construct; identical to SEQ ID NO: 2521
  misc_feature 1..2148: note = Synthetic
  source 1..2148: mol_type = other DNA

SEQ ID NO: 5098 - DNA, 2151 bp, synthetic construct; identical to SEQ ID NO: 2522
  misc_feature 1..2151: note = Synthetic
  source 1..2151: mol_type = other DNA

SEQ ID NO: 5099 - DNA, 2157 bp, synthetic construct; identical to SEQ ID NO: 2523
  misc_feature 1..2157: note = Synthetic
  source 1..2157: mol_type = other DNA

SEQ ID NO: 5100 - DNA, 2157 bp, synthetic construct; identical to SEQ ID NO: 2524
  misc_feature 1..2157: note = Synthetic
  source 1..2157: mol_type = other DNA

SEQ ID NO: 5101 - DNA, 2157 bp, synthetic construct; identical to SEQ ID NO: 2525
  misc_feature 1..2157: note = Synthetic
  source 1..2157: mol_type = other DNA

SEQ ID NO: 5102 - DNA, 2139 bp, synthetic construct; identical to SEQ ID NO: 2526
  misc_feature 1..2139: note = Synthetic
  source 1..2139: mol_type = other DNA

SEQ ID NO: 5103 - DNA, 2157 bp, synthetic construct; identical to SEQ ID NO: 2527
  misc_feature 1..2157: note = Synthetic
  source 1..2157: mol_type = other DNA

SEQ ID NO: 5104 - DNA, 2151 bp, synthetic construct; identical to SEQ ID NO: 2528
  misc_feature 1..2151: note = Synthetic
  source 1..2151: mol_type = other DNA

SEQ ID NO: 5105 - DNA, 2139 bp, synthetic construct; identical to SEQ ID NO: 2529
  misc_feature 1..2139: note = Synthetic
  source 1..2139: mol_type = other DNA

SEQ ID NO: 5106 - DNA, 2139 bp, synthetic construct; identical to SEQ ID NO: 2530
  misc_feature 1..2139: note = Synthetic
  source 1..2139: mol_type = other DNA

SEQ ID NO: 5107 - DNA, 2139 bp, synthetic construct; identical to SEQ ID NO: 2531
  misc_feature 1..2139: note = Synthetic
  source 1..2139: mol_type = other DNA

SEQ ID NO: 5108 - DNA, 2157 bp, synthetic construct; identical to SEQ ID NO: 2532
  misc_feature 1..2157: note = Synthetic
  source 1..2157: mol_type = other DNA

SEQ ID NO: 5109 - DNA, 2139 bp, synthetic construct; identical to SEQ ID NO: 2533
  misc_feature 1..2139: note = Synthetic
  source 1..2139: mol_type = other DNA

SEQ ID NO: 5110 - DNA, 2157 bp, synthetic construct; identical to SEQ ID NO: 2534
  misc_feature 1..2157: note = Synthetic
  source 1..2157: mol_type = other DNA

SEQ ID NO: 5111 - DNA, 2172 bp, synthetic construct; identical to SEQ ID NO: 2535
  misc_feature 1..2172: note = Synthetic
  source 1..2172: mol_type = other DNA

SEQ ID NO: 5112 - DNA, 2133 bp, synthetic construct; identical to SEQ ID NO: 2536
  misc_feature 1..2133: note = Synthetic
  source 1..2133: mol_type = other DNA

SEQ ID NO: 5113 - DNA, 2157 bp, synthetic construct; identical to SEQ ID NO: 2537
  misc_feature 1..2157: note = Synthetic
  source 1..2157: mol_type = other DNA

SEQ ID NO: 5114 - DNA, 2157 bp, synthetic construct; identical to SEQ ID NO: 2538
  misc_feature 1..2157: note = Synthetic
  source 1..2157: mol_type = other DNA

SEQ ID NO: 5115 - DNA, 2145 bp, synthetic construct; identical to SEQ ID NO: 2539
  misc_feature 1..2145: note = Synthetic
  source 1..2145: mol_type = other DNA

SEQ ID NO: 5116 - DNA, 2169 bp, synthetic construct; identical to SEQ ID NO: 2540
  misc_feature 1..2169: note = Synthetic
  source 1..2169: mol_type = other DNA

SEQ ID NO: 5117 - DNA, 2151 bp, synthetic construct; identical to SEQ ID NO: 2541
  misc_feature 1..2151: note = Synthetic
  source 1..2151: mol_type = other DNA

SEQ ID NO: 5118 - DNA, 2148 bp, synthetic construct; identical to SEQ ID NO: 2542
  misc_feature 1..2148: note = Synthetic
  source 1..2148: mol_type = other DNA

SEQ ID NO: 5119 - DNA, 2160 bp, synthetic construct; identical to SEQ ID NO: 2543
  misc_feature 1..2160: note = Synthetic
  source 1..2160: mol_type = other DNA

SEQ ID NO: 5120 - DNA, 2160 bp, synthetic construct; identical to SEQ ID NO: 2544
  misc_feature 1..2160: note = Synthetic
  source 1..2160: mol_type = other DNA

SEQ ID NO: 5121 - DNA, 2151 bp, synthetic construct; identical to SEQ ID NO: 2545
  misc_feature 1..2151: note = Synthetic
  source 1..2151: mol_type = other DNA

SEQ ID NO: 5122 - DNA, 2151 bp, synthetic construct; identical to SEQ ID NO: 2546
  misc_feature 1..2151: note = Synthetic
  source 1..2151: mol_type = other DNA

SEQ ID NO: 5123 - DNA, 2148 bp, synthetic construct; identical to SEQ ID NO: 2547
  misc_feature 1..2148: note = Synthetic
  source 1..2148: mol_type = other DNA

SEQ ID NO: 5124 - DNA, 2151 bp, synthetic construct; identical to SEQ ID NO: 2548
  misc_feature 1..2151: note = Synthetic
  source 1..2151: mol_type = other DNA

SEQ ID NO: 5125 - protein, 497 aa, synthetic construct; identical to SEQ ID NO: 2549
  REGION 1..497: note = Synthetic

SEQ ID NO: 5126 - protein, 497 aa, synthetic construct; identical to SEQ ID NO: 2550
  REGION 1..497: note = Synthetic

SEQ ID NO: 5127 - protein, 497 aa, synthetic construct; identical to SEQ ID NO: 2551
  REGION 1..497: note = Synthetic

SEQ ID NO: 5128 - protein, 491 aa, synthetic construct; identical to SEQ ID NO: 2552
  REGION 1..491: note = Synthetic

SEQ ID NO: 5129 - protein, 497 aa, synthetic construct; identical to SEQ ID NO: 2553
  REGION 1..497: note = Synthetic

SEQ ID NO: 5130 - protein, 495 aa, synthetic construct; identical to SEQ ID NO: 2554
  REGION 1..495: note = Synthetic

SEQ ID NO: 5131 - protein, 491 aa, synthetic construct; identical to SEQ ID NO: 2555
  REGION 1..491: note = Synthetic

SEQ ID NO: 5132 - protein, 491 aa, synthetic construct; identical to SEQ ID NO: 2556
  REGION 1..491: note = Synthetic

SEQ ID NO: 5133 - protein, 491 aa, synthetic construct; identical to SEQ ID NO: 2557
  REGION 1..491: note = Synthetic

SEQ ID NO: 5134 - protein, 497 aa, synthetic construct; identical to SEQ ID NO: 2558
  REGION 1..497: note = Synthetic

SEQ ID NO: 5135 - protein, 491 aa, synthetic construct; identical to SEQ ID NO: 2559
  REGION 1..491: note = Synthetic

SEQ ID NO: 5136 - protein, 497 aa, synthetic construct; identical to SEQ ID NO: 2560
  REGION 1..497: note = Synthetic

SEQ ID NO: 5137 - protein, 502 aa, synthetic construct; identical to SEQ ID NO: 2561
  REGION 1..502: note = Synthetic

SEQ ID NO: 5138 - protein, 489 aa, synthetic construct; identical to SEQ ID NO: 2562
  REGION 1..489: note = Synthetic

SEQ ID NO: 5139 - protein, 497 aa, synthetic construct; identical to SEQ ID NO: 2563
  REGION 1..497: note = Synthetic

SEQ ID NO: 5140 - protein, 497 aa, synthetic construct; identical to SEQ ID NO: 2564
  REGION 1..497: note = Synthetic

SEQ ID NO: 5141 - protein, 493 aa, synthetic construct; identical to SEQ ID NO: 2565
  REGION 1..493: note = Synthetic

SEQ ID NO: 5142 - protein, 501 aa, synthetic construct; identical to SEQ ID NO: 2566
  REGION 1..501: note = Synthetic

SEQ ID NO: 5143 - protein, 495 aa, synthetic construct; identical to SEQ ID NO: 2567
  REGION 1..495: note = Synthetic

SEQ ID NO: 5144 - protein, 494 aa, synthetic construct; identical to SEQ ID NO: 2568
  REGION 1..494: note = Synthetic

SEQ ID NO: 5145 - protein, 498 aa, synthetic construct; identical to SEQ ID NO: 2569
  REGION 1..498: note = Synthetic

SEQ ID NO: 5146 - protein, 498 aa, synthetic construct; identical to SEQ ID NO: 2570
  REGION 1..498: note = Synthetic

SEQ ID NO: 5147 - protein, 495 aa, synthetic construct; identical to SEQ ID NO: 2571
  REGION 1..495: note = Synthetic

SEQ ID NO: 5148 - protein, 495 aa, synthetic construct; identical to SEQ ID NO: 2572
  REGION 1..495: note = Synthetic

SEQ ID NO: 5149 - protein, 494 aa, synthetic construct; identical to SEQ ID NO: 2573
  REGION 1..494: note = Synthetic

SEQ ID NO: 5150 - protein, 495 aa, synthetic construct; identical to SEQ ID NO: 2574
  REGION 1..495: note = Synthetic

SEQ ID NO: 5151 - DNA, 1491 bp, synthetic construct; identical to SEQ ID NO: 2575
  misc_feature 1..1491: note = Synthetic
  source 1..1491: mol_type = other DNA

SEQ ID NO: 5152 - DNA, 1491 bp, synthetic construct; identical to SEQ ID NO: 2576
  misc_feature 1..1491: note = Synthetic
  source 1..1491: mol_type = other DNA

SEQ ID NO: 5153 - DNA, 1491 bp, synthetic construct; identical to SEQ ID NO: 2577
  misc_feature 1..1491: note = Synthetic
  source 1..1491: mol_type = other DNA

SEQ ID NO: 5154 - DNA, 1473 bp, synthetic construct; identical to SEQ ID NO: 2578
  misc_feature 1..1473: note = Synthetic
  source 1..1473: mol_type = other DNA

SEQ ID NO: 5155 - DNA, 1491 bp, synthetic construct; identical to SEQ ID NO: 2579
  misc_feature 1..1491: note = Synthetic
  source 1..1491: mol_type = other DNA

SEQ ID NO: 5156 - DNA, 1485 bp, synthetic construct; identical to SEQ ID NO: 2580
  misc_feature 1..1485: note = Synthetic
  source 1..1485: mol_type = other DNA

SEQ ID NO: 5157 - DNA, 1473 bp, synthetic construct; identical to SEQ ID NO: 2581
  misc_feature 1..1473: note = Synthetic
  source 1..1473: mol_type = other DNA

SEQ ID NO: 5158 - DNA, 1473 bp, synthetic construct; identical to SEQ ID NO: 2582
  misc_feature 1..1473: note = Synthetic
  source 1..1473: mol_type = other DNA

SEQ ID NO: 5159 - DNA, 1473 bp, synthetic construct; identical to SEQ ID NO: 2583
  misc_feature 1..1473: note = Synthetic
  source 1..1473: mol_type = other DNA

SEQ ID NO: 5160 - DNA, 1491 bp, synthetic construct; identical to SEQ ID NO: 2584
  misc_feature 1..1491: note = Synthetic
  source 1..1491: mol_type = other DNA

SEQ ID NO: 5161 - DNA, 1473 bp, synthetic construct; identical to SEQ ID NO: 2585
  misc_feature 1..1473: note = Synthetic
  source 1..1473: mol_type = other DNA

SEQ ID NO: 5162 - DNA, 1491 bp, synthetic construct; identical to SEQ ID NO: 2586
  misc_feature 1..1491: note = Synthetic
  source 1..1491: mol_type = other DNA

SEQ ID NO: 5163 - DNA, 1506 bp, synthetic construct; identical to SEQ ID NO: 2587
  misc_feature 1..1506: note = Synthetic
  source 1..1506: mol_type = other DNA

SEQ ID NO: 5164 - DNA, 1467 bp, synthetic construct; identical to SEQ ID NO: 2588
  misc_feature 1..1467: note = Synthetic
  source 1..1467: mol_type = other DNA

SEQ ID NO: 5165 - DNA, 1491 bp, synthetic construct; identical to SEQ ID NO: 2589
  misc_feature 1..1491: note = Synthetic
  source 1..1491: mol_type = other DNA

SEQ ID NO: 5166 - DNA, 1491 bp, synthetic construct; identical to SEQ ID NO: 2590
  misc_feature 1..1491: note = Synthetic
  source 1..1491: mol_type = other DNA

SEQ ID NO: 5167 - DNA, 1479 bp, synthetic construct; identical to SEQ ID NO: 2591
  misc_feature 1..1479: note = Synthetic
  source 1..1479: mol_type = other DNA

SEQ ID NO: 5168 - DNA, 1503 bp, synthetic construct; identical to SEQ ID NO: 2592
  misc_feature 1..1503: note = Synthetic
  source 1..1503: mol_type = other DNA

SEQ ID NO: 5169 - DNA, 1485 bp, synthetic construct; identical to SEQ ID NO: 2593
  misc_feature 1..1485: note = Synthetic
  source 1..1485: mol_type = other DNA

SEQ ID NO: 5170 - DNA, 1482 bp, synthetic construct; identical to SEQ ID NO: 2594
  misc_feature 1..1482: note = Synthetic
  source 1..1482: mol_type = other DNA

SEQ ID NO: 5171 - DNA, 1494 bp, synthetic construct; identical to SEQ ID NO: 2595
  misc_feature 1..1494: note = Synthetic
  source 1..1494: mol_type = other DNA

SEQ ID NO: 5172 - DNA, 1494 bp, synthetic construct; identical to SEQ ID NO: 2596
  misc_feature 1..1494: note = Synthetic
  source 1..1494: mol_type = other DNA

SEQ ID NO: 5173 - DNA, 1485 bp, synthetic construct; identical to SEQ ID NO: 2597
  misc_feature 1..1485: note = Synthetic
  source 1..1485: mol_type = other DNA

SEQ ID NO: 5174 - DNA, 1485 bp, synthetic construct; identical to SEQ ID NO: 2598
  misc_feature 1..1485: note = Synthetic
  source 1..1485: mol_type = other DNA

SEQ ID NO: 5175 - DNA, 1482 bp, synthetic construct; identical to SEQ ID NO: 2599
  misc_feature 1..1482: note = Synthetic
  source 1..1482: mol_type = other DNA

SEQ ID NO: 5176 - DNA, 1485 bp, synthetic construct; identical to SEQ ID NO: 2600
  misc_feature 1..1485: note = Synthetic
  source 1..1485: mol_type = other DNA

SEQ ID NO: 5177 - protein, 722 aa, synthetic construct; identical to SEQ ID NO: 2601
  REGION 1..722: note = Synthetic

SEQ ID NO: 5178 - protein, 722 aa, synthetic construct; identical to SEQ ID NO: 2602
  REGION 1..722: note = Synthetic

SEQ ID NO: 5179 - protein, 722 aa, synthetic construct; identical to SEQ ID NO: 2603
  REGION 1..722: note = Synthetic

SEQ ID NO: 5180 - protein, 716 aa, synthetic construct; identical to SEQ ID NO: 2604
  REGION 1..716: note = Synthetic

SEQ ID NO: 5181 - protein, 722 aa, synthetic construct; identical to SEQ ID NO: 2605
  REGION 1..722: note = Synthetic

SEQ ID NO: 5182 - protein, 720 aa, synthetic construct; identical to SEQ ID NO: 2606
  REGION 1..720: note = Synthetic

SEQ ID NO: 5183 - protein, 716 aa, synthetic construct; identical to SEQ ID NO: 2607
  REGION 1..716: note = Synthetic

SEQ ID NO: 5184 - protein, 716 aa, synthetic construct; identical to SEQ ID NO: 2608
  REGION 1..716: note = Synthetic

SEQ ID NO: 5185 - protein, 716 aa, synthetic construct; identical to SEQ ID NO: 2609
  REGION 1..716: note = Synthetic

SEQ ID NO: 5186 - protein, 722 aa, synthetic construct; identical to SEQ ID NO: 2610
  REGION 1..722: note = Synthetic

SEQ ID NO: 5187 - protein, 716 aa, synthetic construct; identical to SEQ ID NO: 2611
  REGION 1..716: note = Synthetic

SEQ ID NO: 5188 - protein, 722 aa, synthetic construct; identical to SEQ ID NO: 2612
  REGION 1..722: note = Synthetic

SEQ ID NO: 5189 - protein, 727 aa, synthetic construct; identical to SEQ ID NO: 2613
  REGION 1..727: note = Synthetic

SEQ ID NO: 5190 - protein, 714 aa, synthetic construct; identical to SEQ ID NO: 2614
  REGION 1..714: note = Synthetic

SEQ ID NO: 5191 - protein, 722 aa, synthetic construct; identical to SEQ ID NO: 2615
  REGION 1..722: note = Synthetic

SEQ ID NO: 5192 - protein, 722 aa, synthetic construct; identical to SEQ ID NO: 2616
  REGION 1..722: note = Synthetic

SEQ ID NO: 5193 - protein, 718 aa, synthetic construct; identical to SEQ ID NO: 2617
  REGION 1..718: note = Synthetic

SEQ ID NO: 5194 - protein, 726 aa, synthetic construct; identical to SEQ ID NO: 2618
  REGION 1..726: note = Synthetic

SEQ ID NO: 5195 - protein, 720 aa, synthetic construct; identical to SEQ ID NO: 2619
  REGION 1..720: note = Synthetic

SEQ ID NO: 5196 - protein, 719 aa, synthetic construct; identical to SEQ ID NO: 2620
  REGION 1..719: note = Synthetic

SEQ ID NO: 5197 - protein, 723 aa, synthetic construct; identical to SEQ ID NO: 2621
  REGION 1..723: note = Synthetic

SEQ ID NO: 5198 - protein, 723 aa, synthetic construct; identical to SEQ ID NO: 2622
  REGION 1..723: note = Synthetic

SEQ ID NO: 5199 - protein, 720 aa, synthetic construct; identical to SEQ ID NO: 2623
  REGION 1..720: note = Synthetic

SEQ ID NO: 5200 - protein, 720 aa, synthetic construct; identical to SEQ ID NO: 2624
  REGION 1..720: note = Synthetic

SEQ ID NO: 5201 - protein, 719 aa, synthetic construct; identical to SEQ ID NO: 2625
  REGION 1..719: note = Synthetic

SEQ ID NO: 5202 - protein, 720 aa, synthetic construct; identical to SEQ ID NO: 2626
  REGION 1..720: note = Synthetic

SEQ ID NO: 5203 - DNA, 2166 bp, synthetic construct; identical to SEQ ID NO: 2627
  misc_feature 1..2166: note = Synthetic
  source 1..2166: mol_type = other DNA

SEQ ID NO: 5204 - DNA, 2166 bp, synthetic construct; identical to SEQ ID NO: 2628
  misc_feature 1..2166: note = Synthetic
  source 1..2166: mol_type = other DNA

SEQ ID NO: 5205 - DNA, 2166 bp, synthetic construct; identical to SEQ ID NO: 2629
  misc_feature 1..2166: note = Synthetic
  source 1..2166: mol_type = other DNA

SEQ ID NO: 5206 - DNA, 2148 bp, synthetic construct; identical to SEQ ID NO: 2630
  misc_feature 1..2148: note = Synthetic
  source 1..2148: mol_type = other DNA

SEQ ID NO: 5207 - DNA, 2166 bp, synthetic construct; identical to SEQ ID NO: 2631
  misc_feature 1..2166: note = Synthetic
  source 1..2166: mol_type = other DNA

SEQ ID NO: 5208 - DNA, 2160 bp, synthetic construct; identical to SEQ ID NO: 2632
  misc_feature 1..2160: note = Synthetic
  source 1..2160: mol_type = other DNA

SEQ ID NO: 5209 - DNA, 2148 bp, synthetic construct; identical to SEQ ID NO: 2633
  misc_feature 1..2148: note = Synthetic
  source 1..2148: mol_type = other DNA

SEQ ID NO: 5210 - DNA, 2148 bp, synthetic construct; identical to SEQ ID NO: 2634
  misc_feature 1..2148: note = Synthetic
  source 1..2148: mol_type = other DNA

SEQ ID NO: 5211 - DNA, 2148 bp, synthetic construct; identical to SEQ ID NO: 2635
  misc_feature 1..2148: note = Synthetic
  source 1..2148: mol_type = other DNA

SEQ ID NO: 5212 - DNA, 2166 bp, synthetic construct; identical to SEQ ID NO: 2636
  misc_feature 1..2166: note = Synthetic
  source 1..2166: mol_type = other DNA

SEQ ID NO: 5213 - DNA, 2148 bp, synthetic construct; identical to SEQ ID NO: 2637
  misc_feature 1..2148: note = Synthetic
  source 1..2148: mol_type = other DNA

SEQ ID NO: 5214 - DNA, 2166 bp, synthetic construct; identical to SEQ ID NO: 2638
  misc_feature 1..2166: note = Synthetic
  source 1..2166: mol_type = other DNA

SEQ ID NO: 5215 - DNA, 2181 bp, synthetic construct; identical to SEQ ID NO: 2639
  misc_feature 1..2181: note = Synthetic
  source 1..2181: mol_type = other DNA

SEQ ID NO: 5216 - DNA, 2142 bp, synthetic construct; identical to SEQ ID NO: 2640
  misc_feature 1..2142: note = Synthetic
  source 1..2142: mol_type = other DNA

SEQ ID NO: 5217 - DNA, 2166 bp, synthetic construct; identical to SEQ ID NO: 2641
  misc_feature 1..2166: note = Synthetic
  source 1..2166: mol_type = other DNA

SEQ ID NO: 5218 - DNA, 2166 bp, synthetic construct; identical to SEQ ID NO: 2642
  misc_feature 1..2166: note = Synthetic
  source 1..2166: mol_type = other DNA

SEQ ID NO: 5219 - DNA, 2154 bp, synthetic construct; identical to SEQ ID NO: 2643
  misc_feature 1..2154: note = Synthetic
  source 1..2154: mol_type = other DNA

SEQ ID NO: 5220 - DNA, 2178 bp, synthetic construct; identical to SEQ ID NO: 2644
  misc_feature 1..2178: note = Synthetic
  source 1..2178: mol_type = other DNA

SEQ ID NO: 5221 - DNA, 2160 bp, synthetic construct; identical to SEQ ID NO: 2645
  misc_feature 1..2160: note = Synthetic
  source 1..2160: mol_type = other DNA

SEQ ID NO: 5222 - DNA, 2157 bp, synthetic construct; identical to SEQ ID NO: 2646
  misc_feature 1..2157: note = Synthetic
  source 1..2157: mol_type = other DNA

SEQ ID NO: 5223 - DNA, 2169 bp, synthetic construct; identical to SEQ ID NO: 2647
  misc_feature 1..2169: note = Synthetic
  source 1..2169: mol_type = other DNA

SEQ ID NO: 5224 - DNA, 2169 bp, synthetic construct; identical to SEQ ID NO: 2648
  misc_feature 1..2169: note = Synthetic
  source 1..2169: mol_type = other DNA

SEQ ID NO: 5225 - DNA, 2160 bp, synthetic construct; identical to SEQ ID NO: 2649
  misc_feature 1..2160: note = Synthetic
  source 1..2160: mol_type = other DNA

SEQ ID NO: 5226 - DNA, 2160 bp, synthetic construct; identical to SEQ ID NO: 2650
  misc_feature 1..2160: note = Synthetic
  source 1..2160: mol_type = other DNA

SEQ ID NO: 5227 - DNA, 2157 bp, synthetic construct; identical to SEQ ID NO: 2651
  misc_feature 1..2157: note = Synthetic
  source 1..2157: mol_type = other DNA

SEQ ID NO: 5228 - DNA, 2160 bp, synthetic construct; identical to SEQ ID NO: 2652
  misc_feature 1..2160: note = Synthetic
  source 1..2160: mol_type = other DNA

SEQ ID NO: 5229 - protein, 494 aa, synthetic construct; identical to SEQ ID NO: 2653
  REGION 1..494: note = Synthetic

SEQ ID NO: 5230 - protein, 494 aa, synthetic construct; identical to SEQ ID NO: 2654
  REGION 1..494: note = Synthetic

SEQ ID NO: 5231 - protein, 493 aa, synthetic construct; identical to SEQ ID NO: 2655
  REGION 1..493: note = Synthetic

SEQ ID NO: 5232 - protein, 494 aa, synthetic construct; identical to SEQ ID NO: 2656
  REGION 1..494: note = Synthetic

SEQ ID NO: 5233 - protein, 487 aa, synthetic construct; identical to SEQ ID NO: 2657
  REGION 1..487: note = Synthetic

SEQ ID NO: 5234 - protein, 492 aa, synthetic construct; identical to SEQ ID NO: 2658
  REGION 1..492: note = Synthetic

SEQ ID NO: 5235 - protein, 494 aa, synthetic construct; identical to SEQ ID NO: 2659
  REGION 1..494: note = Synthetic

SEQ ID NO: 5236 - protein, 494 aa, synthetic construct; identical to SEQ ID NO: 2660
  REGION 1..494: note = Synthetic

SEQ ID NO: 5237 - protein, 495 aa, synthetic construct; identical to SEQ ID NO: 2661
  REGION 1..495: note = Synthetic

SEQ ID NO: 5238 - protein, 493 aa, synthetic construct; identical to SEQ ID NO: 2662
  REGION 1..493: note = Synthetic

SEQ ID NO: 5239 - protein, 494 aa, synthetic construct; identical to SEQ ID NO: 2663
  REGION 1..494: note = Synthetic

SEQ ID NO: 5240 - protein, 494 aa, synthetic construct; identical to SEQ ID NO: 2664
  REGION 1..494: note = Synthetic

SEQ ID NO: 5241 - protein, 499 aa, synthetic construct; identical to SEQ ID NO: 2665
  REGION 1..499: note = Synthetic

SEQ ID NO: 5242 - protein, 498 aa, synthetic construct; identical to SEQ ID NO: 2666
  REGION 1..498: note = Synthetic

SEQ ID NO: 5243 - protein, 496 aa, synthetic construct; identical to SEQ ID NO: 2667
  REGION 1..496: note = Synthetic

SEQ ID NO: 5244 - protein, 496 aa, synthetic construct; identical to SEQ ID NO: 2668
  REGION 1..496: note = Synthetic

SEQ ID NO: 5245 - protein, 494 aa, synthetic construct; identical to SEQ ID NO: 2669
  REGION 1..494: note = Synthetic

SEQ ID NO: 5246 - protein, 494 aa, synthetic construct; identical to SEQ ID NO: 2670
  REGION 1..494: note = Synthetic

SEQ ID NO: 5247 - protein, 495 aa, synthetic construct; identical to SEQ ID NO: 2671
  REGION 1..495: note = Synthetic

SEQ ID NO: 5248 - DNA, 1482 bp, synthetic construct; identical to SEQ ID NO: 2672
  misc_feature 1..1482: note = Synthetic
  source 1..1482: mol_type = other DNA

SEQ ID NO: 5249 - DNA, 1482 bp, synthetic construct; identical to SEQ ID NO: 2673
  misc_feature 1..1482: note = Synthetic
  source 1..1482: mol_type = other DNA

SEQ ID NO: 5250 - DNA, 1479 bp, synthetic construct; identical to SEQ ID NO: 2674
  misc_feature 1..1479: note = Synthetic
  source 1..1479: mol_type = other DNA

SEQ ID NO: 5251 - DNA, 1482 bp, synthetic construct; identical to SEQ ID NO: 2675
  misc_feature 1..1482: note = Synthetic
  source 1..1482: mol_type = other DNA

SEQ ID NO: 5252 - DNA, 1462 bp, synthetic construct; identical to SEQ ID NO: 2676
  misc_feature 1..1462: note = Synthetic
  source 1..1462: mol_type = other DNA

SEQ ID NO: 5253 - DNA, 1476 bp, synthetic construct; identical to SEQ ID NO: 2677
  misc_feature 1..1476: note = Synthetic
  source 1..1476: mol_type = other DNA

SEQ ID NO: 5254 - DNA, 1482 bp, synthetic construct; identical to SEQ ID NO: 2678
  misc_feature 1..1482: note = Synthetic
  source 1..1482: mol_type = other DNA

SEQ ID NO: 5255 - DNA, 1482 bp, synthetic construct; identical to SEQ ID NO: 2679
  misc_feature 1..1482: note = Synthetic
  source 1..1482: mol_type = other DNA

SEQ ID NO: 5256 - DNA, 1485 bp, synthetic construct; identical to SEQ ID NO: 2680
  misc_feature 1..1485: note = Synthetic
  source 1..1485: mol_type = other DNA

SEQ ID NO: 5257 - DNA, 1479 bp, synthetic construct; identical to SEQ ID NO: 2681
  misc_feature 1..1479: note = Synthetic
  source 1..1479: mol_type = other DNA

SEQ ID NO: 5258 - DNA, 1482 bp, synthetic construct; identical to SEQ ID NO: 2682
  misc_feature 1..1482: note = Synthetic
  source 1..1482: mol_type = other DNA

SEQ ID NO: 5259 - DNA, 1482 bp, synthetic construct; identical to SEQ ID NO: 2683
  misc_feature 1..1482: note = Synthetic
  source 1..1482: mol_type = other DNA

SEQ ID NO: 5260 - DNA, 1497 bp, synthetic construct; identical to SEQ ID NO: 2684
  misc_feature 1..1497: note = Synthetic
  source 1..1497: mol_type = other DNA

SEQ ID NO: 5261 - DNA, 1494 bp, synthetic construct; identical to SEQ ID NO: 2685
  misc_feature 1..1494: note = Synthetic
  source 1..1494: mol_type = other DNA

SEQ ID NO: 5262 - DNA, 1488 bp, synthetic construct; identical to SEQ ID NO: 2686
  misc_feature 1..1488: note = Synthetic
  source 1..1488: mol_type = other DNA

SEQ ID NO: 5263 - DNA, 1488 bp, synthetic construct; identical to SEQ ID NO: 2687
  misc_feature 1..1488: note = Synthetic
  source 1..1488: mol_type = other DNA

SEQ ID NO: 5264 - DNA, 1482 bp, synthetic construct; identical to SEQ ID NO: 2688
  misc_feature 1..1482: note = Synthetic
  source 1..1482: mol_type = other DNA

SEQ ID NO: 5265 - DNA, 1482 bp, synthetic construct; identical to SEQ ID NO: 2689
  misc_feature 1..1482: note = Synthetic
  source 1..1482: mol_type = other DNA

SEQ ID NO: 5266 - DNA, 1485 bp, synthetic construct; identical to SEQ ID NO: 2690
  misc_feature 1..1485: note = Synthetic
  source 1..1485: mol_type = other DNA

SEQ ID NO: 5267 - DNA, 1482 bp, synthetic construct; identical to SEQ ID NO: 2691
  misc_feature 1..1482: note = Synthetic
  source 1..1482: mol_type = other DNA

SEQ ID NO: 5268 - DNA, 1482 bp, synthetic construct; identical to SEQ ID NO: 2692
  misc_feature 1..1482: note = Synthetic
  source 1..1482: mol_type = other DNA

SEQ ID NO: 5269 - DNA, 1479 bp, synthetic construct; identical to SEQ ID NO: 2693
  misc_feature 1..1479: note = Synthetic
  source 1..1479: mol_type = other DNA

SEQ ID NO: 5270 - DNA, 1482 bp, synthetic construct; identical to SEQ ID NO: 2694
  misc_feature 1..1482: note = Synthetic
  source 1..1482: mol_type = other DNA

SEQ ID NO: 5271 - DNA, 1470 bp, synthetic construct; identical to SEQ ID NO: 2695
  misc_feature 1..1470: note = Synthetic
  source 1..1470: mol_type = other DNA

SEQ ID NO: 5272 - DNA, 1476 bp, synthetic construct; identical to SEQ ID NO: 2696
  misc_feature 1..1476: note = Synthetic
  source 1..1476: mol_type = other DNA

SEQ ID NO: 5273 - DNA, 1482 bp, synthetic construct; identical to SEQ ID NO: 2697
  misc_feature 1..1482: note = Synthetic
  source 1..1482: mol_type = other DNA

SEQ ID NO: 5274 - DNA, 1482 bp, synthetic construct; identical to SEQ ID NO: 2698
  misc_feature 1..1482: note = Synthetic
  source 1..1482: mol_type = other DNA

SEQ ID NO: 5275 - DNA, 1485 bp, synthetic construct; identical to SEQ ID NO: 2699
  misc_feature 1..1485: note = Synthetic
  source 1..1485: mol_type = other DNA

SEQ ID NO: 5276 - DNA, 1479 bp, synthetic construct; identical to SEQ ID NO: 2700
  misc_feature 1..1479: note = Synthetic
  source 1..1479: mol_type = other DNA

SEQ ID NO: 5277 - DNA, 1482 bp, synthetic construct; identical to SEQ ID NO: 2701
  misc_feature 1..1482: note = Synthetic
  source 1..1482: mol_type = other DNA

SEQ ID NO: 5278 - DNA, 1482 bp, synthetic construct; identical to SEQ ID NO: 2702
  misc_feature 1..1482: note = Synthetic
  source 1..1482: mol_type = other DNA

SEQ ID NO: 5279 - DNA, 1497 bp, synthetic construct; identical to SEQ ID NO: 2703
  misc_feature 1..1497: note = Synthetic
  source 1..1497: mol_type = other DNA

SEQ ID NO: 5280 - DNA, 1494 bp, synthetic construct; identical to SEQ ID NO: 2704
  misc_feature 1..1494: note = Synthetic
  source 1..1494: mol_type = other DNA

SEQ ID NO: 5281 - DNA, 1488 bp, synthetic construct; identical to SEQ ID NO: 2705
  misc_feature 1..1488: note = Synthetic
  source 1..1488: mol_type = other DNA

SEQ ID NO: 5282 - DNA, 1488 bp, synthetic construct; identical to SEQ ID NO: 2706
  misc_feature 1..1488: note = Synthetic
  source 1..1488: mol_type = other DNA

SEQ ID NO: 5283 - DNA, 1482 bp, synthetic construct; identical to SEQ ID NO: 2707
  misc_feature 1..1482: note = Synthetic
  source 1..1482: mol_type = other DNA

SEQ ID NO: 5284 - DNA, 1482 bp, synthetic construct; identical to SEQ ID NO: 2708
  misc_feature 1..1482: note = Synthetic
  source 1..1482: mol_type = other DNA

SEQ ID NO: 5285 - DNA, 1485 bp, synthetic construct; identical to SEQ ID NO: 2709
  misc_feature 1..1485: note = Synthetic
  source 1..1485: mol_type = other DNA

SEQ ID NO: 5286 - protein, 719 aa, synthetic construct; identical to SEQ ID NO: 2710
  REGION 1..719: note = Synthetic

SEQ ID NO: 5287 - protein, 719 aa, synthetic construct; identical to SEQ ID NO: 2711
  REGION 1..719: note = Synthetic

SEQ ID NO: 5288 - protein, 718 aa, synthetic construct; identical to SEQ ID NO: 2712
  REGION 1..718: note = Synthetic

SEQ ID NO: 5289 - protein, 719 aa, synthetic construct; identical to SEQ ID NO: 2713
  REGION 1..719: note = Synthetic

SEQ ID NO: 5290 - protein, 712 aa, synthetic construct; identical to SEQ ID NO: 2714
  REGION 1..712: note = Synthetic

SEQ ID NO: 5291 - protein, 717 aa, synthetic construct; identical to SEQ ID NO: 2715
  REGION 1..717: note = Synthetic

SEQ ID NO: 5292 - protein, 719 aa, synthetic construct; identical to SEQ ID NO: 2716
  REGION 1..719: note = Synthetic

SEQ ID NO: 5293 - protein, 719 aa, synthetic construct; identical to SEQ ID NO: 2717
  REGION 1..719: note = Synthetic

SEQ ID NO: 5294 - protein, 720 aa, synthetic construct; identical to SEQ ID NO: 2718
  REGION 1..720: note = Synthetic

SEQ ID NO: 5295 - protein, 718 aa, synthetic construct; identical to SEQ ID NO: 2719
  REGION 1..718: note = Synthetic

SEQ ID NO: 5296 - protein, 719 aa, synthetic construct; identical to SEQ ID NO: 2720
  REGION 1..719: note = Synthetic

SEQ ID NO: 5297 - protein, 719 aa, synthetic construct; identical to SEQ ID NO: 2721
  REGION 1..719: note = Synthetic

SEQ ID NO: 5298 - protein, 724 aa, synthetic construct; identical to SEQ ID NO: 2722
  REGION 1..724: note = Synthetic

SEQ ID NO: 5299 - protein, 723 aa, synthetic construct; identical to SEQ ID NO: 2723
  REGION 1..723: note = Synthetic

SEQ ID NO: 5300 - protein, 721 aa, synthetic construct; identical to SEQ ID NO: 2724
  REGION 1..721: note = Synthetic

SEQ ID NO: 5301 - protein, 721 aa, synthetic construct; identical to SEQ ID NO: 2725
  REGION 1..721: note = Synthetic

SEQ ID NO: 5302 - protein, 719 aa, synthetic construct; identical to SEQ ID NO: 2726
  REGION 1..719: note = Synthetic

SEQ ID NO: 5303 - protein, 719 aa, synthetic construct; identical to SEQ ID NO: 2727
  REGION 1..719: note = Synthetic

SEQ ID NO: 5304 - protein, 720 aa, synthetic construct; identical to SEQ ID NO: 2728
  REGION 1..720: note = Synthetic

SEQ ID NO: 5305 - DNA, 2157 bp, synthetic construct; identical to SEQ ID NO: 2729
  misc_feature 1..2157: note = Synthetic
  source 1..2157: mol_type = other DNA

SEQ ID NO: 5306 - DNA, 2157 bp, synthetic construct; identical to SEQ ID NO: 2730
  misc_feature 1..2157: note = Synthetic
  source 1..2157: mol_type = other DNA

SEQ ID NO: 5307 - DNA, 2154 bp, synthetic construct; identical to SEQ ID NO: 2731
  misc_feature 1..2154: note = Synthetic
  source 1..2154: mol_type = other DNA

SEQ ID NO: 5308 - DNA, 2157 bp, synthetic construct; identical to SEQ ID NO: 2732
  misc_feature 1..2157: note = Synthetic
  source 1..2157: mol_type = other DNA

SEQ ID NO: 5309 - DNA, 2137 bp, synthetic construct; identical to SEQ ID NO: 2733
  misc_feature 1..2137: note = Synthetic
  source 1..2137: mol_type = other DNA

SEQ ID NO: 5310 - DNA, 2151 bp, synthetic construct; identical to SEQ ID NO: 2734
  misc_feature 1..2151: note = Synthetic
  source 1..2151: mol_type = other DNA

SEQ ID NO: 5311 - DNA, 2157 bp, synthetic construct; identical to SEQ ID NO: 2735
  misc_feature 1..2157: note = Synthetic
  source 1..2157: mol_type = other DNA

SEQ ID NO: 5312 - DNA, 2157 bp, synthetic construct; identical to SEQ ID NO: 2736
  misc_feature 1..2157: note = Synthetic
  source 1..2157: mol_type = other DNA

SEQ ID NO: 5313 - DNA, 2160 bp, synthetic construct; identical to SEQ ID NO: 2737
  misc_feature 1..2160: note = Synthetic
  source 1..2160: mol_type = other DNA

SEQ ID NO: 5314 - DNA, 2154 bp, synthetic construct; identical to SEQ ID NO: 2738
  misc_feature 1..2154: note = Synthetic
  source 1..2154: mol_type = other DNA

SEQ ID NO: 5315 - DNA, 2157 bp, synthetic construct; identical to SEQ ID NO: 2739
  misc_feature 1..2157: note = Synthetic
  source 1..2157: mol_type = other DNA

SEQ ID NO: 5316 - DNA, 2157 bp, synthetic construct; identical to SEQ ID NO: 2740
  misc_feature 1..2157: note = Synthetic
  source 1..2157: mol_type = other DNA

SEQ ID NO: 5317 - DNA, 2172 bp, synthetic construct; identical to SEQ ID NO: 2741
  misc_feature 1..2172: note = Synthetic
  source 1..2172: mol_type = other DNA

SEQ ID NO: 5318 - DNA, 2169 bp, synthetic construct; identical to SEQ ID NO: 2742
  misc_feature 1..2169: note = Synthetic
  source 1..2169: mol_type = other DNA

SEQ ID NO: 5319 - DNA, 2163 bp, synthetic construct; identical to SEQ ID NO: 2743
  misc_feature 1..2163: note = Synthetic
  source 1..2163: mol_type = other DNA

SEQ ID NO: 5320 - DNA, 2163 bp, synthetic construct; identical to SEQ ID NO: 2744
  misc_feature 1..2163: note = Synthetic
  source 1..2163: mol_type = other DNA

SEQ ID NO: 5321 - DNA, 2157 bp, synthetic construct; identical to SEQ ID NO: 2745
  misc_feature 1..2157: note = Synthetic
  source 1..2157: mol_type = other DNA

SEQ ID NO: 5322 - DNA, 2157 bp, synthetic construct; identical to SEQ ID NO: 2746
  misc_feature 1..2157: note = Synthetic
  source 1..2157: mol_type = other DNA

SEQ ID NO: 5323 - DNA, 2160 bp, synthetic construct; identical to SEQ ID NO: 2747
  misc_feature 1..2160: note = Synthetic
  source 1..2160: mol_type = other DNA

SEQ ID NO: 5324 - DNA, 2157 bp, synthetic construct; identical to SEQ ID NO: 2748
  misc_feature 1..2157: note = Synthetic
  source 1..2157: mol_type = other DNA

SEQ ID NO: 5325 - DNA, 2157 bp, synthetic construct; identical to SEQ ID NO: 2749
  misc_feature 1..2157: note = Synthetic
  source 1..2157: mol_type = other DNA

SEQ ID NO: 5326 - DNA, 2154 bp, synthetic construct; identical to SEQ ID NO: 2750
  misc_feature 1..2154: note = Synthetic
  source 1..2154: mol_type = other DNA

SEQ ID NO: 5327 - DNA, 2157 bp, synthetic construct; identical to SEQ ID NO: 2751
  misc_feature 1..2157: note = Synthetic
  source 1..2157: mol_type = other DNA

SEQ ID NO: 5328 - DNA, 2145 bp, synthetic construct; identical to SEQ ID NO: 2752
  misc_feature 1..2145: note = Synthetic
  source 1..2145: mol_type = other DNA

SEQ ID NO: 5329 - DNA, 2151 bp, synthetic construct; identical to SEQ ID NO: 2753
  misc_feature 1..2151: note = Synthetic
  source 1..2151: mol_type = other DNA

SEQ ID NO: 5330 - DNA, 2157 bp, synthetic construct; identical to SEQ ID NO: 2754
  misc_feature 1..2157: note = Synthetic
  source 1..2157: mol_type = other DNA

SEQ ID NO: 5331 - DNA, 2157 bp, synthetic construct; identical to SEQ ID NO: 2755
  misc_feature 1..2157: note = Synthetic
  source 1..2157: mol_type = other DNA

SEQ ID NO: 5332 - DNA, 2160 bp, synthetic construct; identical to SEQ ID NO: 2756
  misc_feature 1..2160: note = Synthetic
  source 1..2160: mol_type = other DNA

SEQ ID NO: 5333 - DNA, 2154 bp, synthetic construct; identical to SEQ ID NO: 2757
  misc_feature 1..2154: note = Synthetic
  source 1..2154: mol_type = other DNA

SEQ ID NO: 5334 - DNA, 2157 bp, synthetic construct; identical to SEQ ID NO: 2758
  misc_feature 1..2157: note = Synthetic
  source 1..2157: mol_type = other DNA

SEQ ID NO: 5335 - DNA, 2157 bp, synthetic construct; identical to SEQ ID NO: 2759
  misc_feature 1..2157: note = Synthetic
  source 1..2157: mol_type = other DNA

SEQ ID NO: 5336 - DNA, 2172 bp, synthetic construct; identical to SEQ ID NO: 2760
  misc_feature 1..2172: note = Synthetic
  source 1..2172: mol_type = other DNA

SEQ ID NO: 5337 - DNA, 2169 bp, synthetic construct; identical to SEQ ID NO: 2761
  misc_feature 1..2169: note = Synthetic
  source 1..2169: mol_type = other DNA

SEQ ID NO: 5338 - DNA, 2163 bp, synthetic construct; identical to SEQ ID NO: 2762
  misc_feature 1..2163: note = Synthetic
  source 1..2163: mol_type = other DNA

SEQ ID NO: 5339 - DNA, 2163 bp, synthetic construct; identical to SEQ ID NO: 2763
  misc_feature 1..2163: note = Synthetic
  source 1..2163: mol_type = other DNA

SEQ ID NO: 5340 - DNA, 2157 bp, synthetic construct; identical to SEQ ID NO: 2764
  misc_feature 1..2157: note = Synthetic
  source 1..2157: mol_type = other DNA

SEQ ID NO: 5341 - DNA, 2157 bp, synthetic construct; identical to SEQ ID NO: 2765
  misc_feature 1..2157: note = Synthetic
  source 1..2157: mol_type = other DNA

SEQ ID NO: 5342 - DNA, 2160 bp, synthetic construct; identical to SEQ ID NO: 2766
  misc_feature 1..2160: note = Synthetic
  source 1..2160: mol_type = other DNA

SEQ ID NO: 5343 - protein, 497 aa, synthetic construct; identical to SEQ ID NO: 2767
  REGION 1..497: note = Synthetic

SEQ ID NO: 5344 - protein, 497 aa, synthetic construct; identical to SEQ ID NO: 2768
  REGION 1..497: note = Synthetic

SEQ ID NO: 5345 - protein, 496 aa, synthetic construct; identical to SEQ ID NO: 2769
  REGION 1..496: note = Synthetic

SEQ ID NO: 5346 - protein, 497 aa, synthetic construct; identical to SEQ ID NO: 2770
  REGION 1..497: note = Synthetic

SEQ ID NO: 5347 - protein, 490 aa, synthetic construct; identical to SEQ ID NO: 2771
  REGION 1..490: note = Synthetic

SEQ ID NO: 5348 - protein, 495 aa, synthetic construct; identical to SEQ ID NO: 2772
  REGION 1..495: note = Synthetic

SEQ ID NO: 5349 - protein, 497 aa, synthetic construct; identical to SEQ ID NO: 2773
  REGION 1..497: note = Synthetic

SEQ ID NO: 5350 - protein, 497 aa, synthetic construct; identical to SEQ ID NO: 2774
  REGION 1..497: note = Synthetic

SEQ ID NO: 5351 - protein, 498 aa, synthetic construct; identical to SEQ ID NO: 2775
  REGION 1..498: note = Synthetic

SEQ ID NO: 5352 - protein, 496 aa, synthetic construct; identical to SEQ ID NO: 2776
  REGION 1..496: note = Synthetic

SEQ ID NO: 5353 - protein, 497 aa, synthetic construct; identical to SEQ ID NO: 2777
  REGION 1..497: note = Synthetic

SEQ ID NO: 5354 - protein, 497 aa, synthetic construct; identical to SEQ ID NO: 2778
  REGION 1..497: note = Synthetic

SEQ ID NO: 5355 - protein, 502 aa, synthetic construct; identical to SEQ ID NO: 2779
  REGION 1..502: note = Synthetic

SEQ ID NO: 5356 - protein, 501 aa, synthetic construct; identical to SEQ ID NO: 2780
  REGION 1..501: note = Synthetic

SEQ ID NO: 5357 - protein, 499 aa, synthetic construct; identical to SEQ ID NO: 2781
  REGION 1..499: note = Synthetic

SEQ ID NO: 5358 - protein, 499 aa, synthetic construct; identical to SEQ ID NO: 2782
  REGION 1..499: note = Synthetic

SEQ ID NO: 5359 - protein, 497 aa, synthetic construct; identical to SEQ ID NO: 2783
  REGION 1..497: note = Synthetic

SEQ ID NO: 5360 - protein, 497 aa, synthetic construct; identical to SEQ ID NO: 2784
  REGION 1..497: note = Synthetic

SEQ ID NO: 5361 - protein, 498 aa, synthetic construct; identical to SEQ ID NO: 2785
  REGION 1..498: note = Synthetic

SEQ ID NO: 5362 - DNA, 1491 bp, synthetic construct; identical to SEQ ID NO: 2786
  misc_feature 1..1491: note = Synthetic
  source 1..1491: mol_type = other DNA

SEQ ID NO: 5363 - DNA, 1491 bp, synthetic construct; identical to SEQ ID NO: 2787
  misc_feature 1..1491: note = Synthetic
  source 1..1491: mol_type = other DNA

SEQ ID NO: 5364 - DNA, 1488 bp, synthetic construct; identical to SEQ ID NO: 2788
  misc_feature 1..1488: note = Synthetic
  source 1..1488: mol_type = other DNA

SEQ ID NO: 5365 - DNA, 1491 bp, synthetic construct; identical to SEQ ID NO: 2789
  misc_feature 1..1491: note = Synthetic
  source 1..1491: mol_type = other DNA

SEQ ID NO: 5366 - DNA, 1471 bp, synthetic construct; identical to SEQ ID NO: 2790
  misc_feature 1..1471: note = Synthetic
  source 1..1471: mol_type = other DNA

SEQ ID NO: 5367 - DNA, 1485 bp, synthetic construct; identical to SEQ ID NO: 2791
  misc_feature 1..1485: note = Synthetic
  source 1..1485: mol_type = other DNA

SEQ ID NO: 5368 - DNA, 1491 bp, synthetic construct; identical to SEQ ID NO: 2792
  misc_feature 1..1491: note = Synthetic
  source 1..1491: mol_type = other DNA

SEQ ID NO: 5369 - DNA, 1491 bp, synthetic construct; identical to SEQ ID NO: 2793
  misc_feature 1..1491: note = Synthetic
  source 1..1491: mol_type = other DNA

SEQ ID NO: 5370 - DNA, 1494 bp, synthetic construct; identical to SEQ ID NO: 2794
  misc_feature 1..1494: note = Synthetic
  source 1..1494: mol_type = other DNA

SEQ ID NO: 5371 - DNA, 1488 bp, synthetic construct; identical to SEQ ID NO: 2795
  misc_feature 1..1488: note = Synthetic
  source 1..1488: mol_type = other DNA

SEQ ID NO: 5372 - DNA, 1491 bp, synthetic construct; identical to SEQ ID NO: 2796
  misc_feature 1..1491: note = Synthetic
  source 1..1491: mol_type = other DNA

SEQ ID NO: 5373 - DNA, 1491 bp, synthetic construct; identical to SEQ ID NO: 2797
  misc_feature 1..1491: note = Synthetic
  source 1..1491: mol_type = other DNA

SEQ ID NO: 5374 - DNA, 1506 bp, synthetic construct; identical to SEQ ID NO: 2798
  misc_feature 1..1506: note = Synthetic
  source 1..1506: mol_type = other DNA

SEQ ID NO: 5375 - DNA, 1503 bp, synthetic construct; identical to SEQ ID NO: 2799
  misc_feature 1..1503: note = Synthetic
  source 1..1503: mol_type = other DNA

SEQ ID NO: 5376 - DNA, 1497 bp, synthetic construct; identical to SEQ ID NO: 2800
  misc_feature 1..1497: note = Synthetic
  source 1..1497: mol_type = other DNA

SEQ ID NO: 5377 - DNA, 1497 bp, synthetic construct; identical to SEQ ID NO: 2801
  misc_feature 1..1497: note = Synthetic
  source 1..1497: mol_type = other DNA

SEQ ID NO: 5378 - DNA, 1491 bp, synthetic construct; identical to SEQ ID NO: 2802
  misc_feature 1..1491: note = Synthetic
  source 1..1491: mol_type = other DNA

SEQ ID NO: 5379 - DNA, 1491 bp, synthetic construct; identical to SEQ ID NO: 2803
  misc_feature 1..1491: note = Synthetic
  source 1..1491: mol_type = other DNA

SEQ ID NO: 5380 - DNA, 1494 bp, synthetic construct; identical to SEQ ID NO: 2804
  misc_feature 1..1494: note = Synthetic
  source 1..1494: mol_type = other DNA

SEQ ID NO: 5381 - DNA, 1491 bp, synthetic construct; identical to SEQ ID NO: 2805
  misc_feature 1..1491: note = Synthetic
  source 1..1491: mol_type = other DNA

SEQ ID NO: 5382 - DNA, 1491 bp, synthetic construct; identical to SEQ ID NO: 2806
  misc_feature 1..1491: note = Synthetic
  source 1..1491: mol_type = other DNA

SEQ ID NO: 5383 - DNA, 1488 bp, synthetic construct; identical to SEQ ID NO: 2807
  misc_feature 1..1488: note = Synthetic
  source 1..1488: mol_type = other DNA

SEQ ID NO: 5384 - DNA, 1485 bp, synthetic construct; identical to SEQ ID NO: 2808
  misc_feature 1..1485: note = Synthetic
  source 1..1485: mol_type = other DNA

SEQ ID NO: 5385 - DNA, 1479 bp, synthetic construct; identical to SEQ ID NO: 2809
  misc_feature 1..1479: note = Synthetic
  source 1..1479: mol_type = other DNA

SEQ ID NO: 5386 - DNA, 1485 bp, synthetic construct; identical to SEQ ID NO: 2810
  misc_feature 1..1485: note = Synthetic
  source 1..1485: mol_type = other DNA

SEQ ID NO: 5387 - DNA, 1491 bp, synthetic construct; identical to SEQ ID NO: 2811
  misc_feature 1..1491: note = Synthetic
  source 1..1491: mol_type = other DNA

SEQ ID NO: 5388 - DNA, 1491 bp, synthetic construct; identical to SEQ ID NO: 2812
  misc_feature 1..1491: note = Synthetic
  source 1..1491: mol_type = other DNA

SEQ ID NO: 5389 - DNA, 1494 bp, synthetic construct; identical to SEQ ID NO: 2813
  misc_feature 1..1494: note = Synthetic
  source 1..1494: mol_type = other DNA

SEQ ID NO: 5390 - DNA, 1488 bp, synthetic construct; identical to SEQ ID NO: 2814
  misc_feature 1..1488: note = Synthetic
  source 1..1488: mol_type = other DNA

SEQ ID NO: 5391 - DNA, 1491 bp, synthetic construct; identical to SEQ ID NO: 2815
  misc_feature 1..1491: note = Synthetic
  source 1..1491: mol_type = other DNA

SEQ ID NO: 5392 - DNA, 1491 bp, synthetic construct; identical to SEQ ID NO: 2816
  misc_feature 1..1491: note = Synthetic
  source 1..1491: mol_type = other DNA

SEQ ID NO: 5393 - DNA, 1506 bp, synthetic construct; identical to SEQ ID NO: 2817
  misc_feature 1..1506: note = Synthetic
  source 1..1506: mol_type = other DNA

SEQ ID NO: 5394 - DNA, 1503 bp, synthetic construct; identical to SEQ ID NO: 2818
  misc_feature 1..1503: note = Synthetic
  source 1..1503: mol_type = other DNA

SEQ ID NO: 5395 - DNA, 1497 bp, synthetic construct; identical to SEQ ID NO: 2819
  misc_feature 1..1497: note = Synthetic
  source 1..1497: mol_type = other DNA

SEQ ID NO: 5396 - DNA, 1497 bp, synthetic construct; identical to SEQ ID NO: 2820
  misc_feature 1..1497: note = Synthetic
  source 1..1497: mol_type = other DNA

SEQ ID NO: 5397 - DNA, 1491 bp, synthetic construct; identical to SEQ ID NO: 2821
  misc_feature 1..1491: note = Synthetic
  source 1..1491: mol_type = other DNA

SEQ ID NO: 5398 - DNA, 1491 bp, synthetic construct; identical to SEQ ID NO: 2822
  misc_feature 1..1491: note = Synthetic
  source 1..1491: mol_type = other DNA

SEQ ID NO: 5399 - DNA, 1494 bp, synthetic construct; identical to SEQ ID NO: 2823
  misc_feature 1..1494: note = Synthetic
  source 1..1494: mol_type = other DNA

SEQ ID NO: 5400 - protein, 722 aa, synthetic construct; identical to SEQ ID NO: 2824
  REGION 1..722: note = Synthetic

SEQ ID NO: 5401 - protein, 722 aa, synthetic construct; identical to SEQ ID NO: 2825
  REGION 1..722: note = Synthetic

SEQ ID NO: 5402 - protein, 721 aa, synthetic construct; identical to SEQ ID NO: 2826
  REGION 1..721: note = Synthetic

SEQ ID NO: 5403 - protein, 722 aa, synthetic construct; identical to SEQ ID NO: 2827
  REGION 1..722: note = Synthetic

SEQ ID NO: 5404 - protein, 715 aa, synthetic construct; identical to SEQ ID NO: 2828
  REGION 1..715: note = Synthetic

SEQ ID NO: 5405 - protein, 720 aa, synthetic construct; identical to SEQ ID NO: 2829
  REGION 1..720: note = Synthetic

SEQ ID NO: 5406 - protein, 722 aa, synthetic construct; identical to SEQ ID NO: 2830
  REGION 1..722: note = Synthetic

SEQ ID NO: 5407 - protein, 722 aa, synthetic construct; identical to SEQ ID NO: 2831
  REGION 1..722: note = Synthetic

SEQ ID NO: 5408 - protein, 723 aa, synthetic construct; identical to SEQ ID NO: 2832
  REGION 1..723: note = Synthetic

SEQ ID NO: 5409 - protein, 721 aa, synthetic construct; identical to SEQ ID NO: 2833
  REGION 1..721: note = Synthetic

SEQ ID NO: 5410 - protein, 722 aa, synthetic construct; identical to SEQ ID NO: 2834
  REGION 1..722: note = Synthetic

SEQ ID NO: 5411 - protein, 722 aa, synthetic construct; identical to SEQ ID NO: 2835
  REGION 1..722: note = Synthetic

SEQ ID NO: 5412 - protein, 727 aa, synthetic construct; identical to SEQ ID NO: 2836
  REGION 1..727: note = Synthetic

SEQ ID NO: 5413 - protein, 726 aa, synthetic construct; identical to SEQ ID NO: 2837
  REGION 1..726: note = Synthetic

SEQ ID NO: 5414 - protein, 724 aa, synthetic construct; identical to SEQ ID NO: 2838
  REGION 1..724: note = Synthetic

SEQ ID NO: 5415 - protein, 724 aa, synthetic construct; identical to SEQ ID NO: 2839
  REGION 1..724: note = Synthetic

SEQ ID NO: 5416 - protein, 722 aa, synthetic construct; identical to SEQ ID NO: 2840
  REGION 1..722: note = Synthetic

SEQ ID NO: 5417 - protein, 722 aa, synthetic construct; identical to SEQ ID NO: 2841
  REGION 1..722: note = Synthetic

SEQ ID NO: 5418 - protein, 723 aa, synthetic construct; identical to SEQ ID NO: 2842
  REGION 1..723: note = Synthetic

SEQ ID NO: 5419 - DNA, 2166 bp, synthetic construct; identical to SEQ ID NO: 2843
  misc_feature 1..2166: note = Synthetic
  source 1..2166: mol_type = other DNA

SEQ ID NO: 5420 - DNA, 2166 bp, synthetic construct; identical to SEQ ID NO: 2844
  misc_feature 1..2166: note = Synthetic
  source 1..2166: mol_type = other DNA

SEQ ID NO: 5421 - DNA, 2163 bp, synthetic construct; identical to SEQ ID NO: 2845
  misc_feature 1..2163: note = Synthetic
  source 1..2163: mol_type = other DNA

SEQ ID NO: 5422 - DNA, 2166 bp, synthetic construct; identical to SEQ ID NO: 2846
  misc_feature 1..2166: note = Synthetic
  source 1..2166: mol_type = other DNA

SEQ ID NO: 5423 - DNA, 2146 bp, synthetic construct; identical to SEQ ID NO: 2847
  misc_feature 1..2146: note = Synthetic
  source 1..2146: mol_type = other DNA

SEQ ID NO: 5424 - DNA, 2160 bp, synthetic construct; identical to SEQ ID NO: 2848
  misc_feature 1..2160: note = Synthetic
  source 1..2160: mol_type = other DNA

SEQ ID NO: 5425 - DNA, 2166 bp, synthetic construct; identical to SEQ ID NO: 2849
  misc_feature 1..2166: note = Synthetic
  source 1..2166: mol_type = other DNA

SEQ ID NO: 5426 - DNA, 2166 bp, synthetic construct; identical to SEQ ID NO: 2850
  misc_feature 1..2166: note = Synthetic
  source 1..2166: mol_type = other DNA

SEQ ID NO: 5427 - DNA, 2169 bp, synthetic construct; identical to SEQ ID NO: 2851
  misc_feature 1..2169: note = Synthetic
  source 1..2169: mol_type = other DNA

SEQ ID NO: 5428 - DNA, 2163 bp, synthetic construct; identical to SEQ ID NO: 2852
  misc_feature 1..2163: note = Synthetic
  source 1..2163: mol_type = other DNA

SEQ ID NO: 5429 - DNA, 2166 bp, synthetic construct; identical to SEQ ID NO: 2853
  misc_feature 1..2166: note = Synthetic
  source 1..2166: mol_type = other DNA

SEQ ID NO: 5430 - DNA, 2166 bp, synthetic construct; identical to SEQ ID NO: 2854
  misc_feature 1..2166: note = Synthetic
  source 1..2166: mol_type = other DNA

SEQ ID NO: 5431 - DNA, 2181 bp, synthetic construct; identical to SEQ ID NO: 2855
  misc_feature 1..2181: note = Synthetic
  source 1..2181: mol_type = other DNA

SEQ ID NO: 5432 - DNA, 2178 bp, synthetic construct; identical to SEQ ID NO: 2856
  misc_feature 1..2178: note = Synthetic
  source 1..2178: mol_type = other DNA

SEQ ID NO: 5433 - DNA, 2172 bp, synthetic construct; identical to SEQ ID NO: 2857
  misc_feature 1..2172: note = Synthetic
  source 1..2172: mol_type = other DNA

SEQ ID NO: 5434 - DNA, 2172 bp, synthetic construct; identical to SEQ ID NO: 2858
  misc_feature 1..2172: note = Synthetic
  source 1..2172: mol_type = other DNA

SEQ ID NO: 5435 - DNA, 2166 bp, synthetic construct; identical to SEQ ID NO: 2859
  misc_feature 1..2166: note = Synthetic
  source 1..2166: mol_type = other DNA

SEQ ID NO: 5436 - DNA, 2166 bp, synthetic construct; identical to SEQ ID NO: 2860
  misc_feature 1..2166: note = Synthetic
  source 1..2166: mol_type = other DNA

SEQ ID NO: 5437 - DNA, 2169 bp, synthetic construct; identical to SEQ ID NO: 2861
  misc_feature 1..2169: note = Synthetic
  source 1..2169: mol_type = other DNA

SEQ ID NO: 5438 - DNA, 2166 bp, synthetic construct; identical to SEQ ID NO: 2862
  misc_feature 1..2166: note = Synthetic
  source 1..2166: mol_type = other DNA

SEQ ID NO: 5439 - DNA, 2166 bp, synthetic construct; identical to SEQ ID NO: 2863
  misc_feature 1..2166: note = Synthetic
  source 1..2166: mol_type = other DNA

SEQ ID NO: 5440 - DNA, 2163 bp, synthetic construct; identical to SEQ ID NO: 2864
  misc_feature 1..2163: note = Synthetic
  source 1..2163: mol_type = other DNA

SEQ ID NO: 5441 - DNA, 2160 bp, synthetic construct; identical to SEQ ID NO: 2865
  misc_feature 1..2160: note = Synthetic
  source 1..2160: mol_type = other DNA

SEQ ID NO: 5442 - DNA, 2154 bp, synthetic construct; identical to SEQ ID NO: 2866
  misc_feature 1..2154: note = Synthetic
  source 1..2154: mol_type = other DNA

SEQ ID NO: 5443 - DNA, 2160 bp, synthetic construct; identical to SEQ ID NO: 2867
  misc_feature 1..2160: note = Synthetic
  source 1..2160: mol_type = other DNA

SEQ ID NO: 5444 - DNA, 2166 bp, synthetic construct; identical to SEQ ID NO: 2868
  misc_feature 1..2166: note = Synthetic
  source 1..2166: mol_type = other DNA

SEQ ID NO: 5445 - DNA, 2166 bp, synthetic construct; identical to SEQ ID NO: 2869
  misc_feature 1..2166: note = Synthetic
  source 1..2166: mol_type = other DNA

SEQ ID NO: 5446 - DNA, 2169 bp, synthetic construct; identical to SEQ ID NO: 2870
  misc_feature 1..2169: note = Synthetic
  source 1..2169: mol_type = other DNA

SEQ ID NO: 5447 - DNA, 2163 bp, synthetic construct; identical to SEQ ID NO: 2871
  misc_feature 1..2163: note = Synthetic
  source 1..2163: mol_type = other DNA

SEQ ID NO: 5448 - DNA, 2166 bp, synthetic construct; identical to SEQ ID NO: 2872
  misc_feature 1..2166: note = Synthetic
  source 1..2166: mol_type = other DNA

SEQ ID NO: 5449 - DNA, 2166 bp, synthetic construct; identical to SEQ ID NO: 2873
  misc_feature 1..2166: note = Synthetic
  source 1..2166: mol_type = other DNA

SEQ ID NO: 5450 - DNA, 2181 bp, synthetic construct; identical to SEQ ID NO: 2874
  misc_feature 1..2181: note = Synthetic
  source 1..2181: mol_type = other DNA

SEQ ID NO: 5451 - DNA, 2178 bp, synthetic construct; identical to SEQ ID NO: 2875
  misc_feature 1..2178: note = Synthetic
  source 1..2178: mol_type = other DNA

SEQ ID NO: 5452 - DNA, 2172 bp, synthetic construct; identical to SEQ ID NO: 2876
  misc_feature 1..2172: note = Synthetic
  source 1..2172: mol_type = other DNA

SEQ ID NO: 5453 - DNA, 2172 bp, synthetic construct; identical to SEQ ID NO: 2877
  misc_feature 1..2172: note = Synthetic
  source 1..2172: mol_type = other DNA

SEQ ID NO: 5454 - DNA, 2166 bp, synthetic construct; identical to SEQ ID NO: 2878
  misc_feature 1..2166: note = Synthetic
  source 1..2166: mol_type = other DNA

SEQ ID NO: 5455 - DNA, 2166 bp, synthetic construct; identical to SEQ ID NO: 2879
  misc_feature 1..2166: note = Synthetic
  source 1..2166: mol_type = other DNA

SEQ ID NO: 5456 - DNA, 2169 bp, synthetic construct; identical to SEQ ID NO: 2880
  misc_feature 1..2169: note = Synthetic
  source 1..2169: mol_type = other DNA

SEQ ID NO: 5457 - protein, 21 aa, synthetic construct
  REGION 1..21: note = Synthetic
MALPVTALLLPLALLLHAARP

SEQ ID NO: 5458 - protein, 21 aa, synthetic construct
  REGION 1..21: note = Synthetic
MALPVTALLLPLALLLHAARP

SEQ ID NO: 5459 - protein, 21 aa, synthetic construct
  REGION 1..21: note = Synthetic
MALPVTALLLPLALLLHAARP

SEQ ID NO: 5460 - protein, 21 aa, synthetic construct
  REGION 1..21: note = Synthetic
MALPVTALLLPLALLLHAARP

SEQ ID NO: 5461 - protein, 21 aa, synthetic construct
  REGION 1..21: note = Synthetic
MALPVTALLLPLALLLHAARP

SEQ ID NO: 5462 - protein, 21 aa, synthetic construct
  REGION 1..21: note = Synthetic
MALPVTALLLPLALLLHAARP

SEQ ID NO: 5463 - protein, 21 aa, synthetic construct
  REGION 1..21: note = Synthetic
MALPVTALLLPLALLLHAARP

SEQ ID NO: 5464 - protein, 21 aa, synthetic construct
  REGION 1..21: note = Synthetic
MALPVTALLLPLALLLHAARP

SEQ ID NO: 5465 - protein, 21 aa, synthetic construct
  REGION 1..21: note = Synthetic
MALPVTALLLPLALLLHAARP

SEQ ID NO: 5466 - protein, 21 aa, synthetic construct
  REGION 1..21: note = Synthetic
MALPVTALLLPLALLLHAARP

SEQ ID NO: 5467 - protein, 21 aa, synthetic construct
  REGION 1..21: note = Synthetic
MALPVTALLLPLALLLHAARP

SEQ ID NO: 5468 - protein, 21 aa, synthetic construct
  REGION 1..21: note = Synthetic
MALPVTALLLPLALLLHAARP

SEQ ID NO: 5469 - protein, 21 aa, synthetic construct
  REGION 1..21: note = Synthetic
MALPVTALLLPLALLLHAARP

SEQ ID NO: 5470 - protein, 21 aa, synthetic construct
  REGION 1..21: note = Synthetic
MALPVTALLLPLALLLHAARP

SEQ ID NO: 5471 - protein, 21 aa, synthetic construct
  REGION 1..21: note = Synthetic
MALPVTALLLPLALLLHAARP

SEQ ID NO: 5472 - protein, 21 aa, synthetic construct
  REGION 1..21: note = Synthetic
MALPVTALLLPLALLLHAARP

SEQ ID NO: 5473 - protein, 21 aa, synthetic construct
  REGION 1..21: note = Synthetic
MALPVTALLLPLALLLHAARP

SEQ ID NO: 5474 - protein, 21 aa, synthetic construct
  REGION 1..21: note = Synthetic
MALPVTALLLPLALLLHAARP

SEQ ID NO: 5475 - protein, 21 aa, synthetic construct
  REGION 1..21: note = Synthetic
MALPVTALLLPLALLLHAARP

SEQ ID NO: 5476 - protein, 21 aa, synthetic construct
  REGION 1..21: note = Synthetic
MALPVTALLLPLALLLHAARP

SEQ ID NO: 5477 - protein, 21 aa, synthetic construct
  REGION 1..21: note = Synthetic
MALPVTALLLPLALLLHAARP

SEQ ID NO: 5478 - protein, 21 aa, synthetic construct
  REGION 1..21: note = Synthetic
MALPVTALLLPLALLLHAARP

SEQ ID NO: 5479 - protein, 21 aa, synthetic construct
  REGION 1..21: note = Synthetic
MALPVTALLLPLALLLHAARP

SEQ ID NO: 5480 - DNA, 63 bp, synthetic construct; identical to SEQ ID NO: 1374
  misc_feature 1..63: note = Synthetic
  source 1..63: mol_type = other DNA

SEQ ID NO: 5481 - DNA, 63 bp, synthetic construct; identical to SEQ ID NO: 1374
  misc_feature 1..63: note = Synthetic
  source 1..63: mol_type = other DNA

SEQ ID NO: 5482 - DNA, 63 bp, synthetic construct; identical to SEQ ID NO: 1374
  misc_feature 1..63: note = Synthetic
  source 1..63: mol_type = other DNA

SEQ ID NO: 5483 - DNA, 63 bp, synthetic construct; identical to SEQ ID NO: 1374
  misc_feature 1..63: note = Synthetic
  source 1..63: mol_type = other DNA

SEQ ID NO: 5484 - DNA, 63 bp, synthetic construct; identical to SEQ ID NO: 1374
  misc_feature 1..63: note = Synthetic
  source 1..63: mol_type = other DNA

SEQ ID NO: 5485 - DNA, 63 bp, synthetic construct; identical to SEQ ID NO: 1374
  misc_feature 1..63: note = Synthetic
  source 1..63: mol_type = other DNA

SEQ ID NO: 5486 - DNA, 63 bp, synthetic construct; identical to SEQ ID NO: 1374
  misc_feature 1..63: note = Synthetic
  source 1..63: mol_type = other DNA

SEQ ID NO: 5487 - DNA, 63 bp, synthetic construct; identical to SEQ ID NO: 1374
  misc_feature 1..63: note = Synthetic
  source 1..63: mol_type = other DNA

SEQ ID NO: 5488 - DNA, 63 bp, synthetic construct; identical to SEQ ID NO: 1374
  misc_feature 1..63: note = Synthetic
  source 1..63: mol_type = other DNA

SEQ ID NO: 5489 - DNA, 63 bp, synthetic construct; identical to SEQ ID NO: 1374
  misc_feature 1..63: note = Synthetic
  source 1..63: mol_type = other DNA

SEQ ID NO: 5490 - DNA, 63 bp, synthetic construct; identical to SEQ ID NO: 1374
  misc_feature 1..63: note = Synthetic
  source 1..63: mol_type = other DNA

SEQ ID NO: 5491 - DNA, 63 bp, synthetic construct; identical to SEQ ID NO: 1374
  misc_feature 1..63: note = Synthetic
  source 1..63: mol_type = other DNA

SEQ ID NO: 5492 - DNA, 63 bp, synthetic construct; identical to SEQ ID NO: 1374
  misc_feature 1..63: note = Synthetic
  source 1..63: mol_type = other DNA

SEQ ID NO: 5493 - DNA, 63 bp, synthetic construct; identical to SEQ ID NO: 1374
  misc_feature 1..63: note = Synthetic
  source 1..63: mol_type = other DNA

SEQ ID NO: 5494 - DNA, 63 bp, synthetic construct; identical to SEQ ID NO: 1374
  misc_feature 1..63: note = Synthetic
  source 1..63: mol_type = other DNA

SEQ ID NO: 5495 - DNA, 63 bp, synthetic construct; identical to SEQ ID NO: 1374
  misc_feature 1..63: note = Synthetic
  source 1..63: mol_type = other DNA

SEQ ID NO: 5496 - DNA, 63 bp, synthetic construct; identical to SEQ ID NO: 1374
  misc_feature 1..63: note = Synthetic
  source 1..63: mol_type = other DNA

SEQ ID NO: 5497 - DNA, 63 bp, synthetic construct; identical to SEQ ID NO: 1374
  misc_feature 1..63: note = Synthetic
  source 1..63: mol_type = other DNA

SEQ ID NO: 5498 - DNA, 63 bp, synthetic construct; identical to SEQ ID NO: 1374
  misc_feature 1..63: note = Synthetic
  source 1..63: mol_type = other DNA

SEQ ID NO: 5499 - DNA, 63 bp, synthetic construct; identical to SEQ ID NO: 1374
  misc_feature 1..63: note = Synthetic
  source 1..63: mol_type = other DNA

SEQ ID NO: 5500 - DNA, 63 bp, synthetic construct; identical to SEQ ID NO: 1374
  misc_feature 1..63: note = Synthetic
  source 1..63: mol_type = other DNA

SEQ ID NO: 5501 - DNA, 63 bp, synthetic construct; identical to SEQ ID NO: 1374
  misc_feature 1..63: note = Synthetic
  source 1..63: mol_type = other DNA

SEQ ID NO: 5502 - DNA, 63 bp, synthetic construct; identical to SEQ ID NO: 1374
  misc_feature 1..63: note = Synthetic
  source 1..63: mol_type = other DNA

SEQ ID NO: 5503 - protein, 359 aa, synthetic construct; identical to SEQ ID NO: 3393
  REGION 1..359: note = Synthetic

SEQ ID NO: 5504 - protein, 358 aa, synthetic construct; identical to SEQ ID NO: 3394
  REGION 1..358: note = Synthetic

SEQ ID NO: 5505 - protein, 361 aa, synthetic construct; identical to SEQ ID NO: 3395
  REGION 1..361: note = Synthetic

SEQ ID NO: 5506 - protein, 356 aa, synthetic construct; identical to SEQ ID NO: 3396
  REGION 1..356: note = Synthetic

SEQ ID NO: 5507 - protein, 355 aa, synthetic construct; identical to SEQ ID NO: 3397
  REGION 1..355: note = Synthetic

SEQ ID NO: 5508 - protein, 361 aa, synthetic construct; identical to SEQ ID NO: 3398
  REGION 1..361: note = Synthetic

SEQ ID NO: 5509 - protein, 356 aa, synthetic construct; identical to SEQ ID NO: 3399
  REGION 1..356: note = Synthetic

SEQ ID NO: 5510 - protein, 361 aa, synthetic construct; identical to SEQ ID NO: 3400
  REGION 1..361: note = Synthetic

SEQ ID NO: 5511 - protein, 363 aa, synthetic construct; identical to SEQ ID NO: 3401
  REGION 1..363: note = Synthetic

SEQ ID NO: 5512 - protein, 361 aa, synthetic construct; identical to SEQ ID NO: 3402
  REGION 1..361: note = Synthetic

SEQ ID NO: 5513 - protein, 362 aa, synthetic construct; identical to SEQ ID NO: 3403
  REGION 1..362: note = Synthetic

SEQ ID NO: 5514 - protein, 360 aa, synthetic construct; identical to SEQ ID NO: 3404
  REGION 1..360: note = Synthetic

SEQ ID NO: 5515 - protein, 362 aa, synthetic construct; identical to SEQ ID NO: 3405
  REGION 1..362: note = Synthetic

SEQ ID NO: 5516 - protein, 361 aa, synthetic construct; identical to SEQ ID NO: 3406
  REGION 1..361: note = Synthetic

SEQ ID NO: 5517 - protein, 361 aa, synthetic construct; identical to SEQ ID NO: 3407
  REGION 1..361: note = Synthetic

SEQ ID NO: 5518 - protein, 355 aa, synthetic construct; identical to SEQ ID NO: 3408
  REGION 1..355: note = Synthetic

SEQ ID NO: 5519 - protein, 363 aa, synthetic construct; identical to SEQ ID NO: 3409
  REGION 1..363: note = Synthetic

SEQ ID NO: 5520 - protein, 358 aa, synthetic construct; identical to SEQ ID NO: 3410
  REGION 1..358: note = Synthetic

SEQ ID NO: 5521 - protein, 355 aa, synthetic construct; identical to SEQ ID NO: 3411
  REGION 1..355: note = Synthetic

SEQ ID NO: 5522 - protein, 356 aa, synthetic construct; identical to SEQ ID NO: 3412
  REGION 1..356: note = Synthetic

SEQ ID NO: 5523 - protein, 355 aa, synthetic construct; identical to SEQ ID NO: 3413
  REGION 1..355: note = Synthetic

SEQ ID NO: 5524 - protein, 356 aa, synthetic construct; identical to SEQ ID NO: 3414
  REGION 1..356: note = Synthetic

SEQ ID NO: 5525 - protein, 358 aa, synthetic construct; identical to SEQ ID NO: 3415
  REGION 1..358: note = Synthetic

SEQ ID NO: 5526 - DNA, 1077 bp, synthetic construct; identical to SEQ ID NO: 3416
  misc_feature 1..1077: note = Synthetic
  source 1..1077: mol_type = other DNA

SEQ ID NO: 5527 - DNA, 1074 bp, synthetic construct; identical to SEQ ID NO: 3417
  misc_feature 1..1074: note = Synthetic
  source 1..1074: mol_type = other DNA

SEQ ID NO: 5528 - DNA, 1083 bp, synthetic construct; identical to SEQ ID NO: 3418
  misc_feature 1..1083: note = Synthetic
  source 1..1083: mol_type = other DNA

SEQ ID NO: 5529 - DNA, 1068 bp, synthetic construct; identical to SEQ ID NO: 3419
  misc_feature 1..1068: note = Synthetic
  source 1..1068: mol_type = other DNA

SEQ ID NO: 5530 - DNA, 1065 bp, synthetic construct; identical to SEQ ID NO: 3420
  misc_feature 1..1065: note = Synthetic
  source 1..1065: mol_type = other DNA

SEQ ID NO: 5531 - DNA, 1083 bp, synthetic construct; identical to SEQ ID NO: 3421
  misc_feature 1..1083: note = Synthetic
  source 1..1083: mol_type = other DNA

SEQ ID NO: 5532 - DNA, 1068 bp, synthetic construct; identical to SEQ ID NO: 3422
  misc_feature 1..1068: note = Synthetic
  source 1..1068: mol_type = other DNA

SEQ ID NO: 5533 - DNA, 1083 bp, synthetic construct; identical to SEQ ID NO: 3423
  misc_feature 1..1083: note = Synthetic
  source 1..1083: mol_type = other DNA

SEQ ID NO: 5534 - DNA, 1089 bp, synthetic construct; identical to SEQ ID NO: 3424
  misc_feature 1..1089: note = Synthetic
  source 1..1089: mol_type = other DNA

SEQ ID NO: 5535 - DNA, 1083 bp, synthetic construct; identical to SEQ ID NO: 3425
  misc_feature 1..1083: note = Synthetic
  source 1..1083: mol_type = other DNA

SEQ ID NO: 5536 - DNA, 1086 bp, synthetic construct; identical to SEQ ID NO: 3426
  misc_feature 1..1086: note = Synthetic
  source 1..1086: mol_type = other DNA

SEQ ID NO: 5537 - DNA, 1080 bp, synthetic construct; identical to SEQ ID NO: 3427
  misc_feature 1..1080: note = Synthetic
  source 1..1080: mol_type = other DNA

SEQ ID NO: 5538 - DNA, 1086 bp, synthetic construct; identical to SEQ ID NO: 3428
  misc_feature 1..1086: note = Synthetic
  source 1..1086: mol_type = other DNA

SEQ ID NO: 5539 - DNA, 1083 bp, synthetic construct; identical to SEQ ID NO: 3429
  misc_feature 1..1083: note = Synthetic
  source 1..1083: mol_type = other DNA

SEQ ID NO: 5540 - DNA, 1083 bp, synthetic construct; identical to SEQ ID NO: 3430
  misc_feature 1..1083: note = Synthetic
  source 1..1083: mol_type = other DNA

SEQ ID NO: 5541 - DNA, 1065 bp, synthetic construct; identical to SEQ ID NO: 3431
  misc_feature 1..1065: note = Synthetic
  source 1..1065: mol_type = other DNA

SEQ ID NO: 5542 - DNA, 1089 bp, synthetic construct; identical to SEQ ID NO: 3432
  misc_feature 1..1089: note = Synthetic
  source 1..1089: mol_type = other DNA

SEQ ID NO: 5543 - DNA, 1074 bp, synthetic construct; identical to SEQ ID NO: 3433
  misc_feature 1..1074: note = Synthetic
  source 1..1074: mol_type = other DNA

SEQ ID NO: 5544 - DNA, 1065 bp, synthetic construct; identical to SEQ ID NO: 3434
  misc_feature 1..1065: note = Synthetic
  source 1..1065: mol_type = other DNA

SEQ ID NO: 5545 - DNA, 1068 bp, synthetic construct; identical to SEQ ID NO: 3435
  misc_feature 1..1068: note = Synthetic
  source 1..1068: mol_type = other DNA

SEQ ID NO: 5546 - DNA, 1065 bp, synthetic construct; identical to SEQ ID NO: 3436
  misc_feature 1..1065: note = Synthetic
  source 1..1065: mol_type = other DNA

SEQ ID NO: 5547 - DNA, 1068 bp, synthetic construct; identical to SEQ ID NO: 3437
  misc_feature 1..1068: note = Synthetic
  source 1..1068: mol_type = other DNA

SEQ ID NO: 5548 - DNA, 1074 bp, synthetic construct; identical to SEQ ID NO: 3438
  misc_feature 1..1074: note = Synthetic
  source 1..1074: mol_type = other DNA

SEQ ID NO: 5549 - DNA, 1077 bp, synthetic construct; identical to SEQ ID NO: 3439
  misc_feature 1..1077: note = Synthetic
  source 1..1077: mol_type = other DNA

SEQ ID NO: 5550 - DNA, 1074 bp, synthetic construct; identical to SEQ ID NO: 3440
  misc_feature 1..1074: note = Synthetic
  source 1..1074: mol_type = other DNA

SEQ ID NO: 5551 - DNA, 1074 bp, synthetic construct; identical to SEQ ID NO: 3440
  misc_feature 1..1074: note = Synthetic
  source 1..1074: mol_type = other DNA

SEQ ID NO: 5552 - DNA, 1068 bp, synthetic construct; identical to SEQ ID NO: 3442
  misc_feature 1..1068: note = Synthetic
  source 1..1068: mol_type = other DNA

SEQ ID NO: 5553 - DNA, 1065 bp, synthetic construct; identical to SEQ ID NO: 3443
  misc_feature 1..1065: note = Synthetic
  source 1..1065: mol_type = other DNA

SEQ ID NO: 5554 - DNA, 1083 bp, synthetic construct; identical to SEQ ID NO: 3444
  misc_feature 1..1083: note = Synthetic
  source 1..1083: mol_type = other DNA

SEQ ID NO: 5555 - DNA, 1068 bp, synthetic construct; identical to SEQ ID NO: 3445
  misc_feature 1..1068: note = Synthetic
  source 1..1068: mol_type = other DNA

SEQ ID NO: 5556 - DNA, 1083 bp, synthetic construct; identical to SEQ ID NO: 3446
  misc_feature 1..1083: note = Synthetic
  source 1..1083: mol_type = other DNA

SEQ ID NO: 5557 - DNA, 1089 bp, synthetic construct; identical to SEQ ID NO: 3447
  misc_feature 1..1089: note = Synthetic
  source 1..1089: mol_type = other DNA

SEQ ID NO: 5558 - DNA, 1083 bp, synthetic construct; identical to SEQ ID NO: 3448
  misc_feature 1..1083: note = Synthetic
  source 1..1083: mol_type = other DNA

SEQ ID NO: 5559 - DNA, 1086 bp, synthetic construct; identical to SEQ ID NO: 3449
  misc_feature 1..1086: note = Synthetic
  source 1..1086: mol_type = other DNA

SEQ ID NO: 5560 - DNA, 1080 bp, synthetic construct; identical to SEQ ID NO: 3450
  misc_feature 1..1080: note = Synthetic
  source 1..1080: mol_type = other DNA

SEQ ID NO: 5561 - DNA, 1086 bp, synthetic construct; identical to SEQ ID NO: 3451
  misc_feature 1..1086: note = Synthetic
  source 1..1086: mol_type = other DNA

SEQ ID NO: 5562 - DNA, 1083 bp, synthetic construct; identical to SEQ ID NO: 3452
  misc_feature 1..1083: note = Synthetic
  source 1..1083: mol_type = other DNA

SEQ ID NO: 5563 - DNA, 1083 bp, synthetic construct; identical to SEQ ID NO: 3453
  misc_feature 1..1083: note = Synthetic
  source 1..1083: mol_type = other DNA

SEQ ID NO: 5564 - DNA, 1065 bp, synthetic construct; identical to SEQ ID NO: 3454
  misc_feature 1..1065: note = Synthetic
  source 1..1065: mol_type = other DNA

SEQ ID NO: 5565 - DNA, 1089 bp, synthetic construct; identical to SEQ ID NO: 3455
  misc_feature 1..1089: note = Synthetic
  source 1..1089: mol_type = other DNA

SEQ ID NO: 5566 - DNA, 1074 bp, synthetic construct; identical to SEQ ID NO: 3456
  misc_feature 1..1074: note = Synthetic
  source 1..1074: mol_type = other DNA

SEQ ID NO: 5567 - DNA, 1065 bp, synthetic construct; identical to SEQ ID NO: 3457
  misc_feature 1..1065: note = Synthetic
  source 1..1065: mol_type = other DNA

SEQ ID NO: 5568 - DNA, 1068 bp, synthetic construct; identical to SEQ ID NO: 3458
  misc_feature 1..1068: note = Synthetic
  source 1..1068: mol_type = other DNA

SEQ ID NO: 5569 - DNA, 1065 bp, synthetic construct; identical to SEQ ID NO: 3459
  misc_feature 1..1065: note = Synthetic
  source 1..1065: mol_type = other DNA

SEQ ID NO: 5570 - DNA, 1068 bp, synthetic construct; identical to SEQ ID NO: 3460
  misc_feature 1..1068: note = Synthetic
  source 1..1068: mol_type = other DNA

SEQ ID NO: 5571 - DNA, 1074 bp, synthetic construct; identical to SEQ ID NO: 3461
  misc_feature 1..1074: note = Synthetic
  source 1..1074: mol_type = other DNA

SEQ ID NO: 5572 - protein, 584 aa, synthetic construct; identical to SEQ ID NO: 3462
  REGION 1..584: note = Synthetic

SEQ ID NO: 5573 - protein, 583 aa, synthetic construct; identical to SEQ ID NO: 3463
  REGION 1..583: note = Synthetic

SEQ ID NO: 5574 - protein, 586 aa, synthetic construct; identical to SEQ ID NO: 3464
  REGION 1..586: note = Synthetic

SEQ ID NO: 5575 - protein, 581 aa, synthetic construct; identical to SEQ ID NO: 3465
  REGION 1..581: note = Synthetic

SEQ ID NO: 5576 - protein, 580 aa, synthetic construct; identical to SEQ ID NO: 3466
  REGION 1..580: note = Synthetic

SEQ ID NO: 5577 - protein, 586 aa, synthetic construct; identical to SEQ ID NO: 3467
  REGION 1..586: note = Synthetic

SEQ ID NO: 5578 - protein, 581 aa, synthetic construct; identical to SEQ ID NO: 3468
  REGION 1..581: note = Synthetic

SEQ ID NO: 5579 - protein, 586 aa, synthetic construct; identical to SEQ ID NO: 3469
  REGION 1..586: note = Synthetic

SEQ ID NO: 5580 - protein, 588 aa, synthetic construct; identical to SEQ ID NO: 3470
  REGION 1..588: note = Synthetic

SEQ ID NO: 5581 - protein, 586 aa, synthetic construct; identical to SEQ ID NO: 3471
  REGION 1..586: note = Synthetic

SEQ ID NO: 5582 - protein, 587 aa, synthetic construct; identical to SEQ ID NO: 3472
  REGION 1..587: note = Synthetic

SEQ ID NO: 5583 - protein, 585 aa, synthetic construct; identical to SEQ ID NO: 3473
  REGION 1..585: note = Synthetic

SEQ ID NO: 5584 - protein, 587 aa, synthetic construct; identical to SEQ ID NO: 3474
  REGION 1..587: note = Synthetic

SEQ ID NO: 5585 - protein, 586 aa, synthetic construct; identical to SEQ ID NO: 3475
  REGION 1..586: note = Synthetic

SEQ ID NO: 5586 - protein, 586 aa, synthetic construct; identical to SEQ ID NO: 3476
  REGION 1..586: note = Synthetic

SEQ ID NO: 5587 - protein, 580 aa, synthetic construct; identical to SEQ ID NO: 3477
  REGION 1..580: note = Synthetic

SEQ ID NO: 5588 - protein, 588 aa, synthetic construct; identical to SEQ ID NO: 3478
  REGION 1..588: note = Synthetic

SEQ ID NO: 5589 - protein, 583 aa, synthetic construct; identical to SEQ ID NO: 3479
  REGION 1..583: note = Synthetic

SEQ ID NO: 5590 - protein, 580 aa, synthetic construct; identical to SEQ ID NO: 3480
  REGION 1..580: note = Synthetic

SEQ ID NO: 5591 - protein, 581 aa, synthetic construct; identical to SEQ ID NO: 3481
  REGION 1..581: note = Synthetic

SEQ ID NO: 5592 - protein, 580 aa, synthetic construct; identical to SEQ ID NO: 3482
  REGION 1..580: note = Synthetic

SEQ ID NO: 5593 - protein, 581 aa, synthetic construct; identical to SEQ ID NO: 3483
  REGION 1..581: note = Synthetic

SEQ ID NO: 5594 - protein, 583 aa, synthetic construct; identical to SEQ ID NO: 3484
  REGION 1..583: note = Synthetic

SEQ ID NO: 5595 - DNA, 1755 bp, synthetic construct; identical to SEQ ID NO: 3485
  misc_feature 1..1755: note = Synthetic
  source 1..1755: mol_type = other DNA

SEQ ID NO: 5596 - DNA, 1752 bp, synthetic construct; identical to SEQ ID NO: 3486
  misc_feature 1..1752: note = Synthetic
  source 1..1752: mol_type = other DNA

SEQ ID NO: 5597 - DNA, 1761 bp, synthetic construct; identical to SEQ ID NO: 3487
  misc_feature 1..1761: note = Synthetic
  source 1..1761: mol_type = other DNA

SEQ ID NO: 5598 - DNA, 1746 bp, synthetic construct; identical to SEQ ID NO: 3488
  misc_feature 1..1746: note = Synthetic
  source 1..1746: mol_type = other DNA

SEQ ID NO: 5599 - DNA, 1743 bp, synthetic construct; identical to SEQ ID NO: 3489
  misc_feature 1..1743: note = Synthetic
  source 1..1743: mol_type = other DNA

SEQ ID NO: 5600 - DNA, 1761 bp, synthetic construct; identical to SEQ ID NO: 3490
  misc_feature 1..1761: note = Synthetic
  source 1..1761: mol_type = other DNA

SEQ ID NO: 5601 - DNA, 1746 bp, synthetic construct; identical to SEQ ID NO: 3491
  misc_feature 1..1746: note = Synthetic
  source 1..1746: mol_type = other DNA

SEQ ID NO: 5602 - DNA, 1761 bp, synthetic construct; identical to SEQ ID NO: 3492
  misc_feature 1..1761: note = Synthetic
  source 1..1761: mol_type = other DNA

SEQ ID NO: 5603 - DNA, 1767 bp, synthetic construct; identical to SEQ ID NO: 3493
  misc_feature 1..1767: note = Synthetic
  source 1..1767: mol_type = other DNA

SEQ ID NO: 5604 - DNA, 1761 bp, synthetic construct; identical to SEQ ID NO: 3494
  misc_feature 1..1761: note = Synthetic
  source 1..1761: mol_type = other DNA

SEQ ID NO: 5605 - DNA, 1764 bp, synthetic construct; identical to SEQ ID NO: 3495
  misc_feature 1..1764: note = Synthetic
  source 1..1764: mol_type = other DNA

SEQ ID NO: 5606 - DNA, 1758 bp, synthetic construct; identical to SEQ ID NO: 3496
  misc_feature 1..1758: note = Synthetic
  source 1..1758: mol_type = other DNA

SEQ ID NO: 5607 - DNA, 1764 bp, synthetic construct; identical to SEQ ID NO: 3497
  misc_feature 1..1764: note = Synthetic
  source 1..1764: mol_type = other DNA

SEQ ID NO: 5608 - DNA, 1761 bp, synthetic construct; identical to SEQ ID NO: 3498
  misc_feature 1..1761: note = Synthetic
  source 1..1761: mol_type = other DNA

SEQ ID NO: 5609 - DNA, 1761 bp, synthetic construct; identical to SEQ ID NO: 3499
  misc_feature 1..1761: note = Synthetic
  source 1..1761: mol_type = other DNA

SEQ ID NO: 5610 - DNA, 1743 bp, synthetic construct; identical to SEQ ID NO: 3500
  misc_feature 1..1743: note = Synthetic
  source 1..1743: mol_type = other DNA

SEQ ID NO: 5611 - DNA, 1767 bp, synthetic construct; identical to SEQ ID NO: 3501
  misc_feature 1..1767: note = Synthetic
  source 1..1767: mol_type = other DNA

SEQ ID NO: 5612 - DNA, 1752 bp, synthetic construct; identical to SEQ ID NO: 3502
  misc_feature 1..1752: note = Synthetic
  source 1..1752: mol_type = other DNA

SEQ ID NO: 5613 - DNA, 1743 bp, synthetic construct; identical to SEQ ID NO: 3503
  misc_feature 1..1743: note = Synthetic
  source 1..1743: mol_type = other DNA

SEQ ID NO: 5614 - DNA, 1746 bp, synthetic construct; identical to SEQ ID NO: 3504
  misc_feature 1..1746: note = Synthetic
  source 1..1746: mol_type = other DNA

SEQ ID NO: 5615 - DNA, 1743 bp, synthetic construct; identical to SEQ ID NO: 3505
  misc_feature 1..1743: note = Synthetic
  source 1..1743: mol_type = other DNA

SEQ ID NO: 5616 - DNA, 1746 bp, synthetic construct; identical to SEQ ID NO: 3506
  misc_feature 1..1746: note = Synthetic
  source 1..1746: mol_type = other DNA

SEQ ID NO: 5617 - DNA, 1752 bp, synthetic construct; identical to SEQ ID NO: 3507
  misc_feature 1..1752: note = Synthetic
  source 1..1752: mol_type = other DNA

SEQ ID NO: 5618 - DNA, 1755 bp, synthetic construct; identical to SEQ ID NO: 3508
  misc_feature 1..1755: note = Synthetic
  source 1..1755: mol_type = other DNA

SEQ ID NO: 5619 - DNA, 1752 bp, synthetic construct; identical to SEQ ID NO: 3509
  misc_feature 1..1752: note = Synthetic
  source 1..1752: mol_type = other DNA

SEQ ID NO: 5620 - DNA, 1752 bp, synthetic construct; identical to SEQ ID NO: 3509
  misc_feature 1..1752: note = Synthetic
  source 1..1752: mol_type = other DNA

SEQ ID NO: 5621 - DNA, 1746 bp, synthetic construct; identical to SEQ ID NO: 3511
  misc_feature 1..1746: note = Synthetic
  source 1..1746: mol_type = other DNA

SEQ ID NO: 5622 - DNA, 1743 bp, synthetic construct; identical to SEQ ID NO: 3512
  misc_feature 1..1743: note = Synthetic
  source 1..1743: mol_type = other DNA

SEQ ID NO: 5623 - DNA, 1761 bp, synthetic construct; identical to SEQ ID NO: 3513
  misc_feature 1..1761: note = Synthetic
  source 1..1761: mol_type = other DNA

SEQ ID NO: 5624 - DNA, 1746 bp, synthetic construct; identical to SEQ ID NO: 3514
  misc_feature 1..1746: note = Synthetic
  source 1..1746: mol_type = other DNA

SEQ ID NO: 5625 - DNA, 1761 bp, synthetic construct; identical to SEQ ID NO: 3515
  misc_feature 1..1761: note = Synthetic
  source 1..1761: mol_type = other DNA

SEQ ID NO: 5626 - DNA, 1767 bp, synthetic construct; identical to SEQ ID NO: 3516
  misc_feature 1..1767: note = Synthetic
  source 1..1767: mol_type = other DNA

SEQ ID NO: 5627 - DNA, 1761 bp, synthetic construct; identical to SEQ ID NO: 3517
  misc_feature 1..1761: note = Synthetic
  source 1..1761: mol_type = other DNA

SEQ ID NO: 5628 - DNA, 1764 bp, synthetic construct; identical to SEQ ID NO: 3518
  misc_feature 1..1764: note = Synthetic
  source 1..1764: mol_type = other DNA

SEQ ID NO: 5629 - DNA, 1758 bp, synthetic construct; identical to SEQ ID NO: 3519
  misc_feature 1..1758: note = Synthetic
  source 1..1758: mol_type = other DNA

SEQ ID NO: 5630 - DNA, 1764 bp, synthetic construct; identical to SEQ ID NO: 3520
  misc_feature 1..1764: note = Synthetic
  source 1..1764: mol_type = other DNA

SEQ ID NO: 5631 - DNA, 1761 bp, synthetic construct; identical to SEQ ID NO: 3521
  misc_feature 1..1761: note = Synthetic
  source 1..1761: mol_type = other DNA

SEQ ID NO: 5632 - DNA, 1761 bp, synthetic construct; identical to SEQ ID NO: 3522
  misc_feature 1..1761: note = Synthetic
  source 1..1761: mol_type = other DNA

SEQ ID NO: 5633 - DNA, 1743 bp, synthetic construct; identical to SEQ ID NO: 3523
  misc_feature 1..1743: note = Synthetic
  source 1..1743: mol_type = other DNA

SEQ ID NO: 5634 - DNA, 1767 bp, synthetic construct; identical to SEQ ID NO: 3524
  misc_feature 1..1767: note = Synthetic
  source 1..1767: mol_type = other DNA

SEQ ID NO: 5635 - DNA, 1752 bp, synthetic construct; identical to SEQ ID NO: 3525
  misc_feature 1..1752: note = Synthetic
  source 1..1752: mol_type = other DNA

SEQ ID NO: 5636 - DNA, 1743 bp, synthetic construct; identical to SEQ ID NO: 3526
  misc_feature 1..1743: note = Synthetic
  source 1..1743: mol_type = other DNA

SEQ ID NO: 5637 - DNA, 1746 bp, synthetic construct; identical to SEQ ID NO: 3527
  misc_feature 1..1746: note = Synthetic
  source 1..1746: mol_type = other DNA

SEQ ID NO: 5638 - DNA, 1743 bp, synthetic construct; identical to SEQ ID NO: 3528
  misc_feature 1..1743: note = Synthetic
  source 1..1743: mol_type = other DNA

SEQ ID NO: 5639 - DNA, 1746 bp, synthetic construct; identical to SEQ ID NO: 3529
  misc_feature 1..1746: note = Synthetic
  source 1..1746: mol_type = other DNA

SEQ ID NO: 5640 - DNA, 1752 bp, synthetic construct; identical to SEQ ID NO: 3530
  misc_feature 1..1752: note = Synthetic
  source 1..1752: mol_type = other DNA

SEQ ID NO: 5641 - protein, 494 aa, synthetic construct; identical to SEQ ID NO: 3531
  REGION 1..494: note = Synthetic

SEQ ID NO: 5642 - protein, 492 aa, synthetic construct; identical to SEQ ID NO: 3532
  REGION 1..492: note = Synthetic

SEQ ID NO: 5643 - protein, 498 aa, synthetic construct; identical to SEQ ID NO: 3533
  REGION 1..498: note = Synthetic

SEQ ID NO: 5644 - protein, 488 aa, synthetic construct; identical to SEQ ID NO: 3534
  REGION 1..488: note = Synthetic

SEQ ID NO: 5645 - protein, 486 aa, synthetic construct; identical to SEQ ID NO: 3535
  REGION 1..486: note = Synthetic

SEQ ID NO: 5646 - protein, 498 aa, synthetic construct; identical to SEQ ID NO: 3536
  REGION 1..498: note = Synthetic

SEQ ID NO: 5647 - protein, 488 aa, synthetic construct; identical to SEQ ID NO: 3537
  REGION 1..488: note = Synthetic

SEQ ID NO: 5648 - protein, 498 aa, synthetic construct; identical to SEQ ID NO: 3538
  REGION 1..498: note = Synthetic

SEQ ID NO: 5649 - protein, 502 aa, synthetic construct; identical to SEQ ID NO: 3539
  REGION 1..502: note = Synthetic

SEQ ID NO: 5650 - protein, 498 aa, synthetic construct; identical to SEQ ID NO: 3540
  REGION 1..498: note = Synthetic

SEQ ID NO: 5651 - protein, 500 aa, synthetic construct; identical to SEQ ID NO: 3541
  REGION 1..500: note = Synthetic

SEQ ID NO: 5652 - protein, 496 aa, synthetic construct; identical to SEQ ID NO: 3542
  REGION 1..496: note = Synthetic

SEQ ID NO: 5653 - protein, 500 aa, synthetic construct; identical to SEQ ID NO: 3543
  REGION 1..500: note = Synthetic

SEQ ID NO: 5654 - protein, 498 aa, synthetic construct; identical to SEQ ID NO: 3544
  REGION 1..498: note = Synthetic

SEQ ID NO: 5655 - protein, 498 aa, synthetic construct; identical to SEQ ID NO: 3545
  REGION 1..498: note = Synthetic

SEQ ID NO: 5656 - protein, 486 aa, synthetic construct; identical to SEQ ID NO: 3546
  REGION 1..486: note = Synthetic

SEQ ID NO: 5657 - protein, 502 aa, synthetic construct; identical to SEQ ID NO: 3547
  REGION 1..502: note = Synthetic

SEQ ID NO: 5658 - protein, 492 aa, synthetic construct; identical to SEQ ID NO: 3548
  REGION 1..492: note = Synthetic

SEQ ID NO: 5659 - protein, 486 aa, synthetic construct; identical to SEQ ID NO: 3549
  REGION 1..486: note = Synthetic

SEQ ID NO: 5660 - protein, 488 aa, synthetic construct; identical to SEQ ID NO: 3550
  REGION 1..488: note = Synthetic

SEQ ID NO: 5661 - protein, 486 aa, synthetic construct; identical to SEQ ID NO: 3551
  REGION 1..486: note = Synthetic

SEQ ID NO: 5662 - protein, 488 aa, synthetic construct; identical to SEQ ID NO: 3552
  REGION 1..488: note = Synthetic

SEQ ID NO: 5663 - protein, 492 aa, synthetic construct; identical to SEQ ID NO: 3553
  REGION 1..492: note = Synthetic

SEQ ID NO: 5664 - DNA, 1482 bp, synthetic construct; identical to SEQ ID NO: 3554
  misc_feature 1..1482: note = Synthetic
  source 1..1482: mol_type = other DNA

SEQ ID NO: 5665 - DNA, 1476 bp, synthetic construct; identical to SEQ ID NO: 3555
  misc_feature 1..1476: note = Synthetic
  source 1..1476: mol_type = other DNA

SEQ ID NO: 5666 - DNA, 1494 bp, synthetic construct; identical to SEQ ID NO: 3556
  misc_feature 1..1494: note = Synthetic
  source 1..1494: mol_type = other DNA

SEQ ID NO: 5667 - DNA, 1464 bp, synthetic construct; identical to SEQ ID NO: 3557
  misc_feature 1..1464: note = Synthetic
  source 1..1464: mol_type = other DNA

SEQ ID NO: 5668 - DNA, 1458 bp, synthetic construct; identical to SEQ ID NO: 3558
  misc_feature 1..1458: note = Synthetic
  source 1..1458: mol_type = other DNA

SEQ ID NO: 5669 - DNA, 1494 bp, synthetic construct; identical to SEQ ID NO: 3559
  misc_feature 1..1494: note = Synthetic
  source 1..1494: mol_type = other DNA

SEQ ID NO: 5670 - DNA, 1464 bp, synthetic construct; identical to SEQ ID NO: 3560
  misc_feature 1..1464: note = Synthetic
  source 1..1464: mol_type = other DNA

SEQ ID NO: 5671 - DNA, 1494 bp, synthetic construct; identical to SEQ ID NO: 3561
  misc_feature 1..1494: note = Synthetic
  source 1..1494: mol_type = other DNA

SEQ ID NO: 5672 - DNA, 1506 bp, synthetic construct; identical to SEQ ID NO: 3562
  misc_feature 1..1506: note = Synthetic
  source 1..1506: mol_type = other DNA

SEQ ID NO: 5673 - DNA, 1494 bp, synthetic construct; identical to SEQ ID NO: 3563
  misc_feature 1..1494: note = Synthetic
  source 1..1494: mol_type = other DNA

SEQ ID NO: 5674 - DNA, 1500 bp, synthetic construct; identical to SEQ ID NO: 3564
  misc_feature 1..1500: note = Synthetic
  source 1..1500: mol_type = other DNA

SEQ ID NO: 5675 - DNA, 1488 bp, synthetic construct; identical to SEQ ID NO: 3565
  misc_feature 1..1488: note = Synthetic
  source 1..1488: mol_type = other DNA

SEQ ID NO: 5676 - DNA, 1500 bp, synthetic construct; identical to SEQ ID NO: 3566
  misc_feature 1..1500: note = Synthetic
  source 1..1500: mol_type = other DNA

SEQ ID NO: 5677 - DNA, 1494 bp, synthetic construct; identical to SEQ ID NO: 3567
  misc_feature 1..1494: note = Synthetic
  source 1..1494: mol_type = other DNA

SEQ ID NO: 5678 - DNA, 1494 bp, synthetic construct; identical to SEQ ID NO: 3568
  misc_feature 1..1494: note = Synthetic
  source 1..1494: mol_type = other DNA

SEQ ID NO: 5679 - DNA, 1458 bp, synthetic construct; identical to SEQ ID NO: 3569
  misc_feature 1..1458: note = Synthetic
  source 1..1458: mol_type = other DNA

SEQ ID NO: 5680 - DNA, 1506 bp, synthetic construct; identical to SEQ ID NO: 3570
  misc_feature 1..1506: note = Synthetic
  source 1..1506: mol_type = other DNA

SEQ ID NO: 5681 - DNA, 1476 bp, synthetic construct; identical to SEQ ID NO: 3571
  misc_feature 1..1476: note = Synthetic
  source 1..1476: mol_type = other DNA

SEQ ID NO: 5682 - DNA, 1458 bp, synthetic construct; identical to SEQ ID NO: 3572
  misc_feature 1..1458: note = Synthetic
  source 1..1458: mol_type = other DNA

SEQ ID NO: 5683 - DNA, 1464 bp, synthetic construct; identical to SEQ ID NO: 3573
  misc_feature 1..1464: note = Synthetic
  source 1..1464: mol_type = other DNA

SEQ ID NO: 5684 - DNA, 1458 bp, synthetic construct; identical to SEQ ID NO: 3574
  misc_feature 1..1458: note = Synthetic
  source 1..1458: mol_type = other DNA

SEQ ID NO: 5685 - DNA, 1464 bp, synthetic construct; identical to SEQ ID NO: 3575
  misc_feature 1..1464: note = Synthetic
  source 1..1464: mol_type = other DNA

SEQ ID NO: 5686 - DNA, 1476 bp, synthetic construct; identical to SEQ ID NO: 3576
  misc_feature 1..1476: note = Synthetic
  source 1..1476: mol_type = other DNA

SEQ ID NO: 5687 - DNA, 1482 bp, synthetic construct; identical to SEQ ID NO: 3577
  misc_feature 1..1482: note = Synthetic
  source 1..1482: mol_type = other DNA

SEQ ID NO: 5688 - DNA, 1476 bp, synthetic construct; identical to SEQ ID NO: 3578
  misc_feature 1..1476: note = Synthetic
  source 1..1476: mol_type = other DNA

SEQ ID NO: 5689 - DNA, 1494 bp, synthetic construct; identical to SEQ ID NO: 3579
  misc_feature 1..1494: note = Synthetic
  source 1..1494: mol_type = other DNA

SEQ ID NO: 5690 - DNA, 1464 bp, synthetic construct; identical to SEQ ID NO: 3580
  misc_feature 1..1464: note = Synthetic
  source 1..1464: mol_type = other DNA

SEQ ID NO: 5691 - DNA, 1458 bp, synthetic construct; identical to SEQ ID NO: 3581
  misc_feature 1..1458: note = Synthetic
  source 1..1458: mol_type = other DNA

SEQ ID NO: 5692 - DNA, 1494 bp, synthetic construct; identical to SEQ ID NO: 3582
  misc_feature 1..1494: note = Synthetic
  source 1..1494: mol_type = other DNA

SEQ ID NO: 5693 - DNA, 1464 bp, synthetic construct; identical to SEQ ID NO: 3583
  misc_feature 1..1464: note = Synthetic
  source 1..1464: mol_type = other DNA

SEQ ID NO: 5694 - DNA, 1494 bp, synthetic construct; identical to SEQ ID NO: 3584
  misc_feature 1..1494: note = Synthetic
  source 1..1494: mol_type = other DNA

SEQ ID NO: 5695 - DNA, 1506 bp, synthetic construct; identical to SEQ ID NO: 3585
  misc_feature 1..1506: note = Synthetic
  source 1..1506: mol_type = other DNA

SEQ ID NO: 5696 - DNA, 1494 bp, synthetic construct; identical to SEQ ID NO: 3586
  misc_feature 1..1494: note = Synthetic
  source 1..1494: mol_type = other DNA

SEQ ID NO: 5697 - DNA, 1500 bp, synthetic construct; identical to SEQ ID NO: 3587
  misc_feature 1..1500: note = Synthetic
  source 1..1500: mol_type = other DNA

SEQ ID NO: 5698 - DNA, 1488 bp, synthetic construct; identical to SEQ ID NO: 3588
  misc_feature 1..1488: note = Synthetic
  source 1..1488: mol_type = other DNA

SEQ ID NO: 5699 - DNA, 1500 bp, synthetic construct; identical to SEQ ID NO: 3589
  misc_feature 1..1500: note = Synthetic
  source 1..1500: mol_type = other DNA

SEQ ID NO: 5700 - DNA, 1494 bp, synthetic construct; identical to SEQ ID NO: 3590
  misc_feature 1..1494: note = Synthetic
  source 1..1494: mol_type = other DNA

SEQ ID NO: 5701 - DNA, 1494 bp, synthetic construct; identical to SEQ ID NO: 3591
  misc_feature 1..1494: note = Synthetic
  source 1..1494: mol_type = other DNA

SEQ ID NO: 5702 - DNA, 1458 bp, synthetic construct; identical to SEQ ID NO: 3592
  misc_feature 1..1458: note = Synthetic
  source 1..1458: mol_type = other DNA

SEQ ID NO: 5703 - DNA, 1506 bp, synthetic construct; identical to SEQ ID NO: 3593
  misc_feature 1..1506: note = Synthetic
  source 1..1506: mol_type = other DNA

SEQ ID NO: 5704 - DNA, 1476 bp, synthetic construct; identical to SEQ ID NO: 3594
  misc_feature 1..1476: note = Synthetic
  source 1..1476: mol_type = other DNA

SEQ ID NO: 5705 - DNA, 1458 bp, synthetic construct; identical to SEQ ID NO: 3595
  misc_feature 1..1458: note = Synthetic
  source 1..1458: mol_type = other DNA

SEQ ID NO: 5706 - DNA, 1464 bp, synthetic construct; identical to SEQ ID NO: 3596
  misc_feature 1..1464: note = Synthetic
  source 1..1464: mol_type = other DNA

SEQ ID NO: 5707 - DNA, 1458 bp, synthetic construct; identical to SEQ ID NO: 3597
  misc_feature 1..1458: note = Synthetic
  source 1..1458: mol_type = other DNA

SEQ ID NO: 5708 - DNA, 1464 bp, synthetic construct; identical to SEQ ID NO: 3598
  misc_feature 1..1464: note = Synthetic
  source 1..1464: mol_type = other DNA

SEQ ID NO: 5709 - DNA, 1476 bp, synthetic construct; identical to SEQ ID NO: 3599
  misc_feature 1..1476: note = Synthetic
  source 1..1476: mol_type = other DNA

SEQ ID NO: 5710 - protein, 719 aa, synthetic construct; identical to SEQ ID NO: 3600
  REGION 1..719: note = Synthetic

SEQ ID NO: 5711 - protein, 717 aa, synthetic construct; identical to SEQ ID NO: 3601
  REGION 1..717: note = Synthetic

SEQ ID NO: 5712 - protein, 723 aa, synthetic construct; identical to SEQ ID NO: 3602
  REGION 1..723: note = Synthetic

SEQ ID NO: 5713 - protein, 713 aa, synthetic construct; identical to SEQ ID NO: 3603
  REGION 1..713: note = Synthetic

SEQ ID NO: 5714 - protein, 711 aa, synthetic construct; identical to SEQ ID NO: 3604
  REGION 1..711: note = Synthetic

SEQ ID NO: 5715 - protein, 723 aa, synthetic construct; identical to SEQ ID NO: 3605
  REGION 1..723: note = Synthetic

SEQ ID NO: 5716 - protein, 713 aa, synthetic construct; identical to SEQ ID NO: 3606
  REGION 1..713: note = Synthetic

SEQ ID NO: 5717 - protein, 723 aa, synthetic construct; identical to SEQ ID NO: 3607
  REGION 1..723: note = Synthetic

SEQ ID NO: 5718 - protein, 727 aa, synthetic construct; identical to SEQ ID NO: 3608
  REGION 1..727: note = Synthetic

SEQ ID NO: 5719 - protein, 723 aa, synthetic construct; identical to SEQ ID NO: 3609
  REGION 1..723: note = Synthetic

SEQ ID NO: 5720 - protein, 725 aa, synthetic construct; identical to SEQ ID NO: 3610
  REGION 1..725: note = Synthetic

SEQ ID NO: 5721 - protein, 721 aa, synthetic construct; identical to SEQ ID NO: 3611
  REGION 1..721: note = Synthetic

SEQ ID NO: 5722 - protein, 725 aa, synthetic construct; identical to SEQ ID NO: 3612
  REGION 1..725: note = Synthetic

SEQ ID NO: 5723 - protein, 723 aa, synthetic construct; identical to SEQ ID NO: 3613
  REGION 1..723: note = Synthetic

SEQ ID NO: 5724 - protein, 723 aa, synthetic construct; identical to SEQ ID NO: 3614
  REGION 1..723: note = Synthetic

SEQ ID NO: 5725 - protein, 711 aa, synthetic construct; identical to SEQ ID NO: 3615
  REGION 1..711: note = Synthetic

SEQ ID NO: 5726 - protein, 727 aa, synthetic construct; identical to SEQ ID NO: 3616
  REGION 1..727: note = Synthetic

SEQ ID NO: 5727 - protein, 717 aa, synthetic construct; identical to SEQ ID NO: 3617
  REGION 1..717: note = Synthetic

SEQ ID NO: 5728 - protein, 711 aa, synthetic construct; identical to SEQ ID NO: 3618
  REGION 1..711: note = Synthetic

SEQ ID NO: 5729 - protein, 713 aa, synthetic construct; identical to SEQ ID NO: 3619
  REGION 1..713: note = Synthetic

SEQ ID NO: 5730 - protein, 711 aa, synthetic construct; identical to SEQ ID NO: 3620
  REGION 1..711: note = Synthetic

SEQ ID NO: 5731 - protein, 713 aa, synthetic construct; identical to SEQ ID NO: 3621
  REGION 1..713: note = Synthetic

SEQ ID NO: 5732 - protein, 717 aa, synthetic construct; identical to SEQ ID NO: 3622
  REGION 1..717: note = Synthetic

SEQ ID NO: 5733 - DNA, 2160 bp, synthetic construct; identical to SEQ ID NO: 3623
  misc_feature 1..2160: note = Synthetic
  source 1..2160: mol_type = other DNA

SEQ ID NO: 5734 - DNA, 2154 bp, synthetic construct; identical to SEQ ID NO: 3624
  misc_feature 1..2154: note = Synthetic
  source 1..2154: mol_type = other DNA

SEQ ID NO: 5735 - DNA, 2172 bp, synthetic construct; identical to SEQ ID NO: 3625
  misc_feature 1..2172: note = Synthetic
  source 1..2172: mol_type = other DNA

SEQ ID NO: 5736 - DNA, 2142 bp, synthetic construct; identical to SEQ ID NO: 3626
  misc_feature 1..2142: note = Synthetic
  source 1..2142: mol_type = other DNA

SEQ ID NO: 5737 - DNA, 2136 bp, synthetic construct; identical to SEQ ID NO: 3627
  misc_feature 1..2136: note = Synthetic
  source 1..2136: mol_type = other DNA

SEQ ID NO: 5738 - DNA, 2172 bp, synthetic construct; identical to SEQ ID NO: 3628
  misc_feature 1..2172: note = Synthetic
  source 1..2172: mol_type = other DNA

SEQ ID NO: 5739 - DNA, 2142 bp, synthetic construct; identical to SEQ ID NO: 3629
  misc_feature 1..2142: note = Synthetic
  source 1..2142: mol_type = other DNA

SEQ ID NO: 5740 - DNA, 2172 bp, synthetic construct; identical to SEQ ID NO: 3630
  misc_feature 1..2172: note = Synthetic
  source 1..2172: mol_type = other DNA

SEQ ID NO: 5741 - DNA, 2184 bp, synthetic construct; identical to SEQ ID NO: 3631
  misc_feature 1..2184: note = Synthetic
  source 1..2184: mol_type = other DNA

SEQ ID NO: 5742 - DNA, 2172 bp, synthetic construct; identical to SEQ ID NO: 3632
  misc_feature 1..2172: note = Synthetic
  source 1..2172: mol_type = other DNA

SEQ ID NO: 5743 - DNA, 2178 bp, synthetic construct; identical to SEQ ID NO: 3633
  misc_feature 1..2178: note = Synthetic
  source 1..2178: mol_type = other DNA

SEQ ID NO: 5744 - DNA, 2166 bp, synthetic construct; identical to SEQ ID NO: 3634
  misc_feature 1..2166: note = Synthetic
  source 1..2166: mol_type = other DNA

SEQ ID NO: 5745 - DNA, 2178 bp, synthetic construct; identical to SEQ ID NO: 3635
  misc_feature 1..2178: note = Synthetic
  source 1..2178: mol_type = other DNA

SEQ ID NO: 5746 - DNA, 2172 bp, synthetic construct; identical to SEQ ID NO: 3636
  misc_feature 1..2172: note = Synthetic
  source 1..2172: mol_type = other DNA

SEQ ID NO: 5747 - DNA, 2172 bp, synthetic construct; identical to SEQ ID NO: 3637
  misc_feature 1..2172: note = Synthetic
  source 1..2172: mol_type = other DNA

SEQ ID NO: 5748 - DNA, 2136 bp, synthetic construct; identical to SEQ ID NO: 3638
  misc_feature 1..2136: note = Synthetic
  source 1..2136: mol_type = other DNA

SEQ ID NO: 5749 - DNA, 2184 bp, synthetic construct; identical to SEQ ID NO: 3639
  misc_feature 1..2184: note = Synthetic
  source 1..2184: mol_type = other DNA

SEQ ID NO: 5750 - DNA, 2154 bp, synthetic construct; identical to SEQ ID NO: 3640
  misc_feature 1..2154: note = Synthetic
  source 1..2154: mol_type = other DNA

SEQ ID NO: 5751 - DNA, 2136 bp, synthetic construct; identical to SEQ ID NO: 3641
  misc_feature 1..2136: note = Synthetic
  source 1..2136: mol_type = other DNA

SEQ ID NO: 5752 - DNA, 2142 bp, synthetic construct; identical to SEQ ID NO: 3642
  misc_feature 1..2142: note = Synthetic
  source 1..2142: mol_type = other DNA

SEQ ID NO: 5753 - DNA, 2136 bp, synthetic construct; identical to SEQ ID NO: 3643
  misc_feature 1..2136: note = Synthetic
  source 1..2136: mol_type = other DNA

SEQ ID NO: 5754 - DNA, 2142 bp, synthetic construct; identical to SEQ ID NO: 3644
  misc_feature 1..2142: note = Synthetic
  source 1..2142: mol_type = other DNA

SEQ ID NO: 5755 - DNA, 2154 bp, synthetic construct; identical to SEQ ID NO: 3645
  misc_feature 1..2154: note = Synthetic
  source 1..2154: mol_type = other DNA

SEQ ID NO: 5756 - DNA, 2160 bp, synthetic construct; identical to SEQ ID NO: 3646
  misc_feature 1..2160: note = Synthetic
  source 1..2160: mol_type = other DNA

SEQ ID NO: 5757 - DNA, 2154 bp, synthetic construct; identical to SEQ ID NO: 3647
  misc_feature 1..2154: note = Synthetic
  source 1..2154: mol_type = other DNA

SEQ ID NO: 5758 - DNA, 2172 bp, synthetic construct; identical to SEQ ID NO: 3648
  misc_feature 1..2172: note = Synthetic
  source 1..2172: mol_type = other DNA

SEQ ID NO: 5759 - DNA, 2142 bp, synthetic construct; identical to SEQ ID NO: 3649
  misc_feature 1..2142: note = Synthetic
  source 1..2142: mol_type = other DNA

SEQ ID NO: 5760 - DNA, 2136 bp, synthetic construct; identical to SEQ ID NO: 3650
  misc_feature 1..2136: note = Synthetic
  source 1..2136: mol_type = other DNA

SEQ ID NO: 5761 - DNA, 2172 bp, synthetic construct; identical to SEQ ID NO: 3651
  misc_feature 1..2172: note = Synthetic
  source 1..2172: mol_type = other DNA

SEQ ID NO: 5762 - DNA, 2142 bp, synthetic construct; identical to SEQ ID NO: 3652
  misc_feature 1..2142: note = Synthetic
  source 1..2142: mol_type = other DNA

SEQ ID NO: 5763 - DNA, 2172 bp, synthetic construct; identical to SEQ ID NO: 3653
  misc_feature 1..2172: note = Synthetic
  source 1..2172: mol_type = other DNA

SEQ ID NO: 5764 - DNA, 2184 bp, synthetic construct; identical to SEQ ID NO: 3654
  misc_feature 1..2184: note = Synthetic
  source 1..2184: mol_type = other DNA

SEQ ID NO: 5765 - DNA, 2172 bp, synthetic construct; identical to SEQ ID NO: 3655
  misc_feature 1..2172: note = Synthetic
  source 1..2172: mol_type = other DNA

SEQ ID NO: 5766 - DNA, 2178 bp, synthetic construct; identical to SEQ ID NO: 3656
  misc_feature 1..2178: note = Synthetic
  source 1..2178: mol_type = other DNA

SEQ ID NO: 5767 - DNA, 2166 bp, synthetic construct; identical to SEQ ID NO: 3657
  misc_feature 1..2166: note = Synthetic
  source 1..2166: mol_type = other DNA

SEQ ID NO: 5768 - DNA, 2178 bp, synthetic construct; identical to SEQ ID NO: 3658
  misc_feature 1..2178: note = Synthetic
  source 1..2178: mol_type = other DNA

SEQ ID NO: 5769 - DNA, 2172 bp, synthetic construct; identical to SEQ ID NO: 3659
  misc_feature 1..2172: note = Synthetic
  source 1..2172: mol_type = other DNA

SEQ ID NO: 5770 - DNA, 2172 bp, synthetic construct; identical to SEQ ID NO: 3660
  misc_feature 1..2172: note = Synthetic
  source 1..2172: mol_type = other DNA

SEQ ID NO: 5771 - DNA, 2136 bp, synthetic construct; identical to SEQ ID NO: 3661
  misc_feature 1..2136: note = Synthetic
  source 1..2136: mol_type = other DNA

SEQ ID NO: 5772 - DNA, 2184 bp, synthetic construct; identical to SEQ ID NO: 3662
  misc_feature 1..2184: note = Synthetic
  source 1..2184: mol_type = other DNA

SEQ ID NO: 5773 - DNA, 2154 bp, synthetic construct; identical to SEQ ID NO: 3663
  misc_feature 1..2154: note = Synthetic
  source 1..2154: mol_type = other DNA

SEQ ID NO: 5774 - DNA, 2136 bp, synthetic construct; identical to SEQ ID NO: 3664
  misc_feature 1..2136: note = Synthetic
  source 1..2136: mol_type = other DNA

SEQ ID NO: 5775 - DNA, 2142 bp, synthetic construct; identical to SEQ ID NO: 3665
  misc_feature 1..2142: note = Synthetic
  source 1..2142: mol_type = other DNA

SEQ ID NO: 5776 - DNA, 2136 bp, synthetic construct; identical to SEQ ID NO: 3666
  misc_feature 1..2136: note = Synthetic
  source 1..2136: mol_type = other DNA

SEQ ID NO: 5777 - DNA, 2142 bp, synthetic construct; identical to SEQ ID NO: 3667
  misc_feature 1..2142: note = Synthetic
  source 1..2142: mol_type = other DNA

SEQ ID NO: 5778 - DNA, 2154 bp, synthetic construct; identical to SEQ ID NO: 3668
  misc_feature 1..2154: note = Synthetic
  source 1..2154: mol_type = other DNA

SEQ ID NO: 5779 - protein, 502 aa, synthetic construct; identical to SEQ ID NO: 3669
  REGION 1..502: note = Synthetic

SEQ ID NO: 5780 - protein, 500 aa, synthetic construct; identical to SEQ ID NO: 3670
  REGION 1..500: note = Synthetic

SEQ ID NO: 5781 - protein, 506 aa, synthetic construct; identical to SEQ ID NO: 3671
  REGION 1..506: note = Synthetic

SEQ ID NO: 5782 - protein, 496 aa, synthetic construct; identical to SEQ ID NO: 3672
  REGION 1..496: note = Synthetic

SEQ ID NO: 5783 - protein, 494 aa, synthetic construct; identical to SEQ ID NO: 3673
  REGION 1..494: note = Synthetic

SEQ ID NO: 5784 - protein, 506 aa, synthetic construct; identical to SEQ ID NO: 3674
  REGION 1..506: note = Synthetic

SEQ ID NO: 5785 - protein, 496 aa, synthetic construct; identical to SEQ ID NO: 3675
  REGION 1..496: note = Synthetic

SEQ ID NO: 5786 - protein, 506 aa, synthetic construct; identical to SEQ ID NO: 3676
  REGION 1..506: note = Synthetic

SEQ ID NO: 5787 - protein, 510 aa, synthetic construct; identical to SEQ ID NO: 3677
  REGION 1..510: note = Synthetic

SEQ ID NO: 5788 - protein, 506 aa, synthetic construct; identical to SEQ ID NO: 3678
  REGION 1..506: note = Synthetic

SEQ ID NO: 5789 - protein, 508 aa, synthetic construct; identical to SEQ ID NO: 3679
  REGION 1..508: note = Synthetic

SEQ ID NO: 5790 - protein, 504 aa, synthetic construct; identical to SEQ ID NO: 3680
  REGION 1..504: note = Synthetic

SEQ ID NO: 5791 - protein, 508 aa, synthetic construct; identical to SEQ ID NO: 3681
  REGION 1..508: note = Synthetic

SEQ ID NO: 5792 - protein, 506 aa, synthetic construct; identical to SEQ ID NO: 3682
  REGION 1..506: note = Synthetic

SEQ ID NO: 5793 - protein, 506 aa, synthetic construct; identical to SEQ ID NO: 3683
  REGION 1..506: note = Synthetic

SEQ ID NO: 5794 - protein, 494 aa, synthetic construct; identical to SEQ ID NO: 3684
  REGION 1..494: note = Synthetic

SEQ ID NO: 5795 - protein, 510 aa, synthetic construct; identical to SEQ ID NO: 3685
  REGION 1..510: note = Synthetic

SEQ ID NO: 5796 - protein, 500 aa, synthetic construct; identical to SEQ ID NO: 3686
  REGION 1..500: note = Synthetic

SEQ ID NO: 5797 - protein, 494 aa, synthetic construct; identical to SEQ ID NO: 3687
  REGION 1..494: note = Synthetic

SEQ ID NO: 5798 - protein, 496 aa, synthetic construct; identical to SEQ ID NO: 3688
  REGION 1..496: note = Synthetic

SEQ ID NO: 5799 - protein, 494 aa, synthetic construct; identical to SEQ ID NO: 3689
  REGION 1..494: note = Synthetic

SEQ ID NO: 5800 - protein, 496 aa, synthetic construct; identical to SEQ ID NO: 3690
  REGION 1..496: note = Synthetic

SEQ ID NO: 5801 - protein, 500 aa, synthetic construct; identical to SEQ ID NO: 3691
  REGION 1..500: note = Synthetic

SEQ ID NO: 5802 - DNA, 1506 bp, synthetic construct; identical to SEQ ID NO: 3692
  misc_feature 1..1506: note = Synthetic
  source 1..1506: mol_type = other DNA

SEQ ID NO: 5803 - DNA, 1500 bp, synthetic construct; identical to SEQ ID NO: 3693
  misc_feature 1..1500: note = Synthetic
  source 1..1500: mol_type = other DNA

SEQ ID NO: 5804 - DNA, 1518 bp, synthetic construct; identical to SEQ ID NO: 3694
  misc_feature 1..1518: note = Synthetic
  source 1..1518: mol_type = other DNA

SEQ ID NO: 5805 - DNA, 1488 bp, synthetic construct; identical to SEQ ID NO: 3695
  misc_feature 1..1488: note = Synthetic
  source 1..1488: mol_type = other DNA

SEQ ID NO: 5806 - DNA, 1482 bp, synthetic construct; identical to SEQ ID NO: 3696
  misc_feature 1..1482: note = Synthetic
  source 1..1482: mol_type = other DNA

SEQ ID NO: 5807 - DNA, 1518 bp, synthetic construct; identical to SEQ ID NO: 3697
  misc_feature 1..1518: note = Synthetic
  source 1..1518: mol_type = other DNA

SEQ ID NO: 5808 - DNA, 1488 bp, synthetic construct; identical to SEQ ID NO: 3698
  misc_feature 1..1488: note = Synthetic
  source 1..1488: mol_type = other DNA

SEQ ID NO: 5809 - DNA, 1518 bp, synthetic construct; identical to SEQ ID NO: 3699
  misc_feature 1..1518: note = Synthetic
  source 1..1518: mol_type = other DNA

SEQ ID NO: 5810 - DNA, 1530 bp, synthetic construct; identical to SEQ ID NO: 3700
  misc_feature 1..1530: note = Synthetic
  source 1..1530: mol_type = other DNA

SEQ ID NO: 5811 - DNA, 1518 bp, synthetic construct; identical to SEQ ID NO: 3701
  misc_feature 1..1518: note = Synthetic
  source 1..1518: mol_type = other DNA

SEQ ID NO: 5812 - DNA, 1524 bp, synthetic construct; identical to SEQ ID NO: 3702
  misc_feature 1..1524: note = Synthetic
  source 1..1524: mol_type = other DNA

SEQ ID NO: 5813 - DNA, 1512 bp, synthetic construct; identical to SEQ ID NO: 3703
  misc_feature 1..1512: note = Synthetic
  source 1..1512: mol_type = other DNA

SEQ ID NO: 5814 - DNA, 1524 bp, synthetic construct; identical to SEQ ID NO: 3704
  misc_feature 1..1524: note = Synthetic
  source 1..1524: mol_type = other DNA

SEQ ID NO: 5815 - DNA, 1518 bp, synthetic construct; identical to SEQ ID NO: 3705
  misc_feature 1..1518: note = Synthetic
  source 1..1518: mol_type = other DNA

SEQ ID NO: 5816 - DNA, 1518 bp, synthetic construct; identical to SEQ ID NO: 3706
  misc_feature 1..1518: note = Synthetic
  source 1..1518: mol_type = other DNA

SEQ ID NO: 5817 - DNA, 1482 bp, synthetic construct; identical to SEQ ID NO: 3707
  misc_feature 1..1482: note = Synthetic
  source 1..1482: mol_type = other DNA

SEQ ID NO: 5818 - DNA, 1530 bp, synthetic construct; identical to SEQ ID NO: 3708
  misc_feature 1..1530: note = Synthetic
  source 1..1530: mol_type = other DNA

SEQ ID NO: 5819 - DNA, 1500 bp, synthetic construct; identical to SEQ ID NO: 3709
  misc_feature 1..1500: note = Synthetic
  source 1..1500: mol_type = other DNA

SEQ ID NO: 5820 - DNA, 1482 bp, synthetic construct; identical to SEQ ID NO: 3710
  misc_feature 1..1482: note = Synthetic
  source 1..1482: mol_type = other DNA

SEQ ID NO: 5821 - DNA, 1488 bp, synthetic construct; identical to SEQ ID NO: 3711
  misc_feature 1..1488: note = Synthetic
  source 1..1488: mol_type = other DNA

SEQ ID NO: 5822 - DNA, 1482 bp, synthetic construct; identical to SEQ ID NO: 3712
  misc_feature 1..1482: note = Synthetic
  source 1..1482: mol_type = other DNA

SEQ ID NO: 5823 - DNA, 1488 bp, synthetic construct; identical to SEQ ID NO: 3713
  misc_feature 1..1488: note = Synthetic
  source 1..1488: mol_type = other DNA

SEQ ID NO: 5824 - DNA, 1500 bp, synthetic construct; identical to SEQ ID NO: 3714
  misc_feature 1..1500: note = Synthetic
  source 1..1500: mol_type = other DNA

SEQ ID NO: 5825 - DNA, 1506 bp, synthetic construct; identical to SEQ ID NO: 3715
  misc_feature 1..1506: note = Synthetic
  source 1..1506: mol_type = other DNA

SEQ ID NO: 5826 - DNA, 1500 bp, synthetic construct; identical to SEQ ID NO: 3716
  misc_feature 1..1500: note = Synthetic
  source 1..1500: mol_type = other DNA

SEQ ID NO: 5827 - DNA, 1518 bp, synthetic construct; identical to SEQ ID NO: 3717
  misc_feature 1..1518: note = Synthetic
  source 1..1518: mol_type = other DNA

SEQ ID NO: 5828 - DNA, 1488 bp, synthetic construct; identical to SEQ ID NO: 3718
  misc_feature 1..1488: note = Synthetic
  source 1..1488: mol_type = other DNA

SEQ ID NO: 5829 - DNA, 1482 bp, synthetic construct; identical to SEQ ID NO: 3719
  misc_feature 1..1482: note = Synthetic
  source 1..1482: mol_type = other DNA

SEQ ID NO: 5830 - DNA, 1518 bp, synthetic construct; identical to SEQ ID NO: 3720
  misc_feature 1..1518: note = Synthetic
  source 1..1518: mol_type = other DNA

SEQ ID NO: 5831 - DNA, 1488 bp, synthetic construct; identical to SEQ ID NO: 3721
  misc_feature 1..1488: note = Synthetic
  source 1..1488: mol_type = other DNA

SEQ ID NO: 5832 - DNA, 1518 bp, synthetic construct; identical to SEQ ID NO: 3722
  misc_feature 1..1518: note = Synthetic
  source 1..1518: mol_type = other DNA

SEQ ID NO: 5833 - DNA, 1530 bp, synthetic construct; identical to SEQ ID NO: 3723
  misc_feature 1..1530: note = Synthetic
  source 1..1530: mol_type = other DNA

SEQ ID NO: 5834 - DNA, 1518 bp, synthetic construct; identical to SEQ ID NO: 3724
  misc_feature 1..1518: note = Synthetic
  source 1..1518: mol_type = other DNA

SEQ ID NO: 5835 - DNA, 1524 bp, synthetic construct; identical to SEQ ID NO: 3725
  misc_feature 1..1524: note = Synthetic
  source 1..1524: mol_type = other DNA

SEQ ID NO: 5836 - DNA, 1512 bp, synthetic construct; identical to SEQ ID NO: 3726
  misc_feature 1..1512: note = Synthetic
  source 1..1512: mol_type = other DNA

SEQ ID NO: 5837 - DNA, 1524 bp, synthetic construct; identical to SEQ ID NO: 3727
  misc_feature 1..1524: note = Synthetic
  source 1..1524: mol_type = other DNA

SEQ ID NO: 5838 - DNA, 1518 bp, synthetic construct; identical to SEQ ID NO: 3728
  misc_feature 1..1518: note = Synthetic
  source 1..1518: mol_type = other DNA

SEQ ID NO: 5839 - DNA, 1518 bp, synthetic construct; identical to SEQ ID NO: 3729
  misc_feature 1..1518: note = Synthetic
  source 1..1518: mol_type = other DNA

SEQ ID NO: 5840 - DNA, 1482 bp, synthetic construct; identical to SEQ ID NO: 3730
  misc_feature 1..1482: note = Synthetic
  source 1..1482: mol_type = other DNA

SEQ ID NO: 5841 - DNA, 1530 bp, synthetic construct; identical to SEQ ID NO: 3731
  misc_feature 1..1530: note = Synthetic
  source 1..1530: mol_type = other DNA

SEQ ID NO: 5842 - DNA, 1500 bp, synthetic construct; identical to SEQ ID NO: 3732
  misc_feature 1..1500: note = Synthetic
  source 1..1500: mol_type = other DNA

SEQ ID NO: 5843 - DNA, 1482 bp, synthetic construct; identical to SEQ ID NO: 3733
  misc_feature 1..1482: note = Synthetic
  source 1..1482: mol_type = other DNA

SEQ ID NO: 5844 - DNA, 1488 bp, synthetic construct; identical to SEQ ID NO: 3734
  misc_feature 1..1488: note = Synthetic
  source 1..1488: mol_type = other DNA

SEQ ID NO: 5845 - DNA, 1482 bp, synthetic construct; identical to SEQ ID NO: 3735
  misc_feature 1..1482: note = Synthetic
  source 1..1482: mol_type = other DNA

SEQ ID NO: 5846 - DNA, 1488 bp, synthetic construct; identical to SEQ ID NO: 3736
  misc_feature 1..1488: note = Synthetic
  source 1..1488: mol_type = other DNA

SEQ ID NO: 5847 - DNA, 1500 bp, synthetic construct; identical to SEQ ID NO: 3737
  misc_feature 1..1500: note = Synthetic
  source 1..1500: mol_type = other DNA

SEQ ID NO: 5848 - protein, 727 aa, synthetic construct; identical to SEQ ID NO: 3738
  REGION 1..727: note = Synthetic

SEQ ID NO: 5849 - protein, 725 aa, synthetic construct; identical to SEQ ID NO: 3739
  REGION 1..725: note = Synthetic

SEQ ID NO: 5850 - protein, 731 aa, synthetic construct; identical to SEQ ID NO: 3740
  REGION 1..731: note = Synthetic

SEQ ID NO: 5851 - protein, 721 aa, synthetic construct; identical to SEQ ID NO: 3741
  REGION 1..721: note = Synthetic

SEQ ID NO: 5852 - protein, 719 aa, synthetic construct; identical to SEQ ID NO: 3742
  REGION 1..719: note = Synthetic

SEQ ID NO: 5853 - protein, 731 aa, synthetic construct; identical to SEQ ID NO: 3743
  REGION 1..731: note = Synthetic

SEQ ID NO: 5854 - protein, 721 aa, synthetic construct; identical to SEQ ID NO: 3744
  REGION 1..721: note = Synthetic

SEQ ID NO: 5855 - protein, 731 aa, synthetic construct; identical to SEQ ID NO: 3745
  REGION 1..731: note = Synthetic

SEQ ID NO: 5856 - protein, 735 aa, synthetic construct; identical to SEQ ID NO: 3746
  REGION 1..735: note = Synthetic

SEQ ID NO: 5857 - protein, 731 aa, synthetic construct; identical to SEQ ID NO: 3747
  REGION 1..731: note = Synthetic

SEQ ID NO: 5858 - protein, 733 aa, synthetic construct; identical to SEQ ID NO: 3748
  REGION 1..733: note = Synthetic

SEQ ID NO: 5859 - protein, 729 aa, synthetic construct; identical to SEQ ID NO: 3749
  REGION 1..729: note = Synthetic

SEQ ID NO: 5860 - protein, 733 aa, synthetic construct; identical to SEQ ID NO: 3750
  REGION 1..733: note = Synthetic

SEQ ID NO: 5861 - protein, 731 aa, synthetic construct; identical to SEQ ID NO: 3751
  REGION 1..731: note = Synthetic

SEQ ID NO: 5862 - protein, 731 aa, synthetic construct; identical to SEQ ID NO: 3752
  REGION 1..731: note = Synthetic

SEQ ID NO: 5863 - protein, 719 aa, synthetic construct; identical to SEQ ID NO: 3753
  REGION 1..719: note = Synthetic

SEQ ID NO: 5864 - protein, 735 aa, synthetic construct; identical to SEQ ID NO: 3754
  REGION 1..735: note = Synthetic

SEQ ID NO: 5865 - protein, 725 aa, synthetic construct; identical to SEQ ID NO: 3755
  REGION 1..725: note = Synthetic

SEQ ID NO: 5866 - protein, 719 aa, synthetic construct; identical to SEQ ID NO: 3756
  REGION 1..719: note = Synthetic

SEQ ID NO: 5867 - protein, 721 aa, synthetic construct; identical to SEQ ID NO: 3757
  REGION 1..721: note = Synthetic

SEQ ID NO: 5868 - protein, 719 aa, synthetic construct; identical to SEQ ID NO: 3758
  REGION 1..719: note = Synthetic

SEQ ID NO: 5869 - protein, 721 aa, synthetic construct; identical to SEQ ID NO: 3759
  REGION 1..721: note = Synthetic

SEQ ID NO: 5870 - protein, 725 aa, synthetic construct; identical to SEQ ID NO: 3760
  REGION 1..725: note = Synthetic

SEQ ID NO: 5871 - DNA, 2181 bp, synthetic construct; identical to SEQ ID NO: 3761
  misc_feature 1..2181: note = Synthetic
  source 1..2181: mol_type = other DNA

SEQ ID NO: 5872 - DNA, 2175 bp, synthetic construct; identical to SEQ ID NO: 3762
  misc_feature 1..2175: note = Synthetic
  source 1..2175: mol_type = other DNA

SEQ ID NO: 5873 - DNA, 2193 bp, synthetic construct; identical to SEQ ID NO: 3763
  misc_feature 1..2193: note = Synthetic
  source 1..2193: mol_type = other DNA

SEQ ID NO: 5874 - DNA, 2163 bp, synthetic construct; identical to SEQ ID NO: 3764
  misc_feature 1..2163: note = Synthetic
  source 1..2163: mol_type = other DNA

SEQ ID NO: 5875 - DNA, 2157 bp, synthetic construct; identical to SEQ ID NO: 3765
  misc_feature 1..2157: note = Synthetic
  source 1..2157: mol_type = other DNA

SEQ ID NO: 5876 - DNA, 2193 bp, synthetic construct; identical to SEQ ID NO: 3766
  misc_feature 1..2193: note = Synthetic
  source 1..2193: mol_type = other DNA

SEQ ID NO: 5877 - DNA, 2163 bp, synthetic construct; identical to SEQ ID NO: 3767
  misc_feature 1..2163: note = Synthetic
  source 1..2163: mol_type = other DNA

SEQ ID NO: 5878 - DNA, 2193 bp, synthetic construct; identical to SEQ ID NO: 3768
  misc_feature 1..2193: note = Synthetic
  source 1..2193: mol_type = other DNA

SEQ ID NO: 5879 - DNA, 2205 bp, synthetic construct; identical to SEQ ID NO: 3769
  misc_feature 1..2205: note = Synthetic
  source 1..2205: mol_type = other DNA

SEQ ID NO: 5880 - DNA, 2193 bp, synthetic construct; identical to SEQ ID NO: 3770
  misc_feature 1..2193: note = Synthetic
  source 1..2193: mol_type = other DNA

SEQ ID NO: 5881 - DNA, 2199 bp, synthetic construct; identical to SEQ ID NO: 3771
  misc_feature 1..2199: note = Synthetic
  source 1..2199: mol_type = other DNA

SEQ ID NO: 5882 - DNA, 2187 bp, synthetic construct; identical to SEQ ID NO: 3772
  misc_feature 1..2187: note = Synthetic
  source 1..2187: mol_type = other DNA

SEQ ID NO: 5883 - DNA, 2199 bp, synthetic construct; identical to SEQ ID NO: 3773
  misc_feature 1..2199: note = Synthetic
  source 1..2199: mol_type = other DNA

SEQ ID NO: 5884 - DNA, 2193 bp, synthetic construct; identical to SEQ ID NO: 3774
  misc_feature 1..2193: note = Synthetic
  source 1..2193: mol_type = other DNA

SEQ ID NO: 5885 - DNA, 2193 bp, synthetic construct; identical to SEQ ID NO: 3775
  misc_feature 1..2193: note = Synthetic
  source 1..2193: mol_type = other DNA

SEQ ID NO: 5886 - DNA, 2157 bp, synthetic construct; identical to SEQ ID NO: 3776
  misc_feature 1..2157: note = Synthetic
  source 1..2157: mol_type = other DNA

SEQ ID NO: 5887 - DNA, 2205 bp, synthetic construct; identical to SEQ ID NO: 3777
  misc_feature 1..2205: note = Synthetic
  source 1..2205: mol_type = other DNA

SEQ ID NO: 5888 - DNA, 2175 bp, synthetic construct; identical to SEQ ID NO: 3778
  misc_feature 1..2175: note = Synthetic
  source 1..2175: mol_type = other DNA

SEQ ID NO: 5889 - DNA, 2157 bp, synthetic construct; identical to SEQ ID NO: 3779
  misc_feature 1..2157: note = Synthetic
  source 1..2157: mol_type = other DNA

SEQ ID NO: 5890 - DNA, 2163 bp, synthetic construct; identical to SEQ ID NO: 3780
  misc_feature 1..2163: note = Synthetic
  source 1..2163: mol_type = other DNA

SEQ ID NO: 5891 - DNA, 2157 bp, synthetic construct; identical to SEQ ID NO: 3781
  misc_feature 1..2157: note = Synthetic
  source 1..2157: mol_type = other DNA

SEQ ID NO: 5892 - DNA, 2163 bp, synthetic construct; identical to SEQ ID NO: 3782
  misc_feature 1..2163: note = Synthetic
  source 1..2163: mol_type = other DNA

SEQ ID NO: 5893 - DNA, 2175 bp, synthetic construct; identical to SEQ ID NO: 3783
  misc_feature 1..2175: note = Synthetic
  source 1..2175: mol_type = other DNA

SEQ ID NO: 5894 - DNA, 2181 bp, synthetic construct; identical to SEQ ID NO: 3784
  misc_feature 1..2181: note = Synthetic
  source 1..2181: mol_type = other DNA

SEQ ID NO: 5895 - DNA, 2175 bp, synthetic construct; identical to SEQ ID NO: 3785
  misc_feature 1..2175: note = Synthetic
  source 1..2175: mol_type = other DNA

SEQ ID NO: 5896 - DNA, 2193 bp, synthetic construct; identical to SEQ ID NO: 3786
  misc_feature 1..2193: note = Synthetic
  source 1..2193: mol_type = other DNA

SEQ ID NO: 5897 - DNA, 2163 bp, synthetic construct; identical to SEQ ID NO: 3787
  misc_feature 1..2163: note = Synthetic
  source 1..2163: mol_type = other DNA

SEQ ID NO: 5898 - DNA, 2157 bp, synthetic construct; identical to SEQ ID NO: 3788
  misc_feature 1..2157: note = Synthetic
  source 1..2157: mol_type = other DNA

SEQ ID NO: 5899 - DNA, 2193 bp, synthetic construct; identical to SEQ ID NO: 3789
  misc_feature 1..2193: note = Synthetic
  source 1..2193: mol_type = other DNA

SEQ ID NO: 5900 - DNA, 2163 bp, synthetic construct; identical to SEQ ID NO: 3790
  misc_feature 1..2163: note = Synthetic
  source 1..2163: mol_type = other DNA

SEQ ID NO: 5901 - DNA, 2193 bp, synthetic construct; identical to SEQ ID NO: 3791
  misc_feature 1..2193: note = Synthetic
  source 1..2193: mol_type = other DNA

SEQ ID NO: 5902 - DNA, 2205 bp, synthetic construct; identical to SEQ ID NO: 3792
  misc_feature 1..2205: note = Synthetic
  source 1..2205: mol_type = other DNA

SEQ ID NO: 5903 - DNA, 2193 bp, synthetic construct; identical to SEQ ID NO: 3793
  misc_feature 1..2193: note = Synthetic
  source 1..2193: mol_type = other DNA

SEQ ID NO: 5904 - DNA, 2199 bp, synthetic construct; identical to SEQ ID NO: 3794
  misc_feature 1..2199: note = Synthetic
  source 1..2199: mol_type = other DNA

SEQ ID NO: 5905 - DNA, 2187 bp, synthetic construct; identical to SEQ ID NO: 3795
  misc_feature 1..2187: note = Synthetic
  source 1..2187: mol_type = other DNA

SEQ ID NO: 5906 - DNA, 2199 bp, synthetic construct; identical to SEQ ID NO: 3796
  misc_feature 1..2199: note = Synthetic
  source 1..2199: mol_type = other DNA

SEQ ID NO: 5907 - DNA, 2193 bp, synthetic construct; identical to SEQ ID NO: 3797
  misc_feature 1..2193: note = Synthetic
  source 1..2193: mol_type = other DNA

SEQ ID NO: 5908 - DNA, 2193 bp, synthetic construct; identical to SEQ ID NO: 3798
  misc_feature 1..2193: note = Synthetic
  source 1..2193: mol_type = other DNA

SEQ ID NO: 5909 - DNA, 2157 bp, synthetic construct; identical to SEQ ID NO: 3799
  misc_feature 1..2157: note = Synthetic
  source 1..2157: mol_type = other DNA

SEQ ID NO: 5910 - DNA, 2205 bp, synthetic construct; identical to SEQ ID NO: 3800
  misc_feature 1..2205: note = Synthetic
  source 1..2205: mol_type = other DNA

SEQ ID NO: 5911 - DNA, 2175 bp, synthetic construct; identical to SEQ ID NO: 3801
  misc_feature 1..2175: note = Synthetic
  source 1..2175: mol_type = other DNA

SEQ ID NO: 5912 - DNA, 2157 bp, synthetic construct; identical to SEQ ID NO: 3802
  misc_feature 1..2157: note = Synthetic
  source 1..2157: mol_type = other DNA

SEQ ID NO: 5913 - DNA, 2163 bp, synthetic construct; identical to SEQ ID NO: 3803
  misc_feature 1..2163: note = Synthetic
  source 1..2163: mol_type = other DNA

SEQ ID NO: 5914 - DNA, 2157 bp, synthetic construct; identical to SEQ ID NO: 3804
  misc_feature 1..2157: note = Synthetic
  source 1..2157: mol_type = other DNA

SEQ ID NO: 5915 - DNA, 2163 bp, synthetic construct; identical to SEQ ID NO: 3805
  misc_feature 1..2163: note = Synthetic
  source 1..2163: mol_type = other DNA

SEQ ID NO: 5916 - DNA, 2175 bp, synthetic construct; identical to SEQ ID NO: 3806
  misc_feature 1..2175: note = Synthetic
  source 1..2175: mol_type = other DNA
